(19) United States
(12) Patent Application Publication
(10) Pub. No.: US 2023/0250147 A1
(43) Pub. Date: Aug. 10, 2023

(54) GLP-1R AGONISTIC PEPTIDES WITH REDUCED ACTIVITY

(71) Applicant: SANOFI, Paris (FR)

(72) Inventors: Oliver BOSCHEINEN, Frankfurt am Main (DE); Werner DITTRICH, Frankfurt am Main (DE); Andreas EVERS, Frankfurt am Main (DE); Thomas LANGER, Frankfurt am Main (DE); Christine RUDOLPH, Frankfurt am Main (DE); Uwe SCHWAHN, Frankfurt am Main (DE); Mark SOMMERFELD, Frankfurt am Main (DE)

(21) Appl. No.: 18/013,479

(22) PCT Filed: Jul. 2, 2020
(86) PCT No.: PCT/EP2020/068747

§ 371 Date: Dec. 28, 2022

(51) Int. Cl. C07K 14/605; A61P 1/16; A61P 3/10

(52) U.S. Cl. CPC C07K 14/605; A61P 1/16; A61P 3/10; A61K 38/00

(57) ABSTRACT

The present invention relates to Glucagon-Like Peptide-1 Receptor (GLP-1R) agonistic peptides with reduced GLP-1R CA agonistic activity, and fusion molecules comprising the same. The present invention also relates to nucleic acid molecules encoding GLP-1R agonistic peptides with reduced GLP-1R agonistic activity, pharmaceutical compositions and combinations comprising GLP-1R agonistic peptides with reduced GLP-1R agonistic activity, and kits including GLP-1R agonistic peptides with reduced GLP-1R agonistic activity. The present invention further relates to the use of GLP-1R agonistic peptides with reduced GLP-1R agonistic activity as medicaments, in particular, for the treatment of obesity, being overweight, metabolic syndrome, diabetes mellitus, diabetic retinopa-CA thy, hyperglycemia, dyslipidemia, NASH and/or atherosclerosis.

### TECHNICAL FIELD OF THE INVENTION

[0001] The present invention relates to GLP-1R (Glucagon-Like Peptide-1 Receptor) agonistic peptides with reduced GLP-1R agonistic activity, combinations and fusion molecules comprising the same, as well as to corresponding nucleic acid molecules, pharmaceutical compositions and kits. It further relates to the use of GLP-1R agonistic peptides as medicaments, in particular for the treatment of obesity, being overweight, metabolic syndrome, diabetes mellitus, diabetic retinopathy, hyperglycemia, dyslipidemia, Non-Alcoholic SteatoHepatitis (NASH) and/or atherosclerosis.

### BACKGROUND OF THE INVENTION

[0002] The use of GLP-1R agonistic peptides alone or in combination with other active pharmaceutical ingredients can have drawbacks. GLP-1R agonistic peptides are already pharmaceutically effective at lower plasma levels. At higher plasma levels, GLP-1 (the primary GLP-1R agonist) is known to have adverse effects, e.g., it induces nausea and vomiting. In contrast, the pharmacological effects of other active pharmaceutical ingredients that may be combined with GLP-1R agonistic peptides, e.g., of Fibroblast Growth Factor 21 (FGF21) compounds, are often observed at higher plasma levels than the plasma levels of GLP-1 that exert pharmacological effects. Taken together, this indicates a risk of GLP-1-mediated adverse effects when administering a GLP-1R agonistic peptide alone or in combination with another active pharmaceutical ingredient, e.g., an FGF21 compound and a GLP-1R agonistic peptide in the form of a fusion molecule. Accordingly, new GLP-1R agonistic peptides that overcome these challenges are needed.

### SUMMARY OF THE INVENTION

[0003] It is an object of the present invention to provide GLP-1R agonistic peptides with reduced GLP-1R agonistic activity. Such GLP-1R agonistic peptides can, for example, be used for balancing the GLP-1R agonist/FGF21 compound activity ratio in order to achieve the beneficial effects of both active agents (e.g., in terms of body weight, lipids, and/or glycemic control and the like) while avoiding potential adverse effects (e.g., nausea and/or vomiting and the like).

[0004] In one aspect, the present invention relates to a GLP-1R agonistic peptide having a GLP-1R agonistic activity which is about 9- to about 531-fold reduced as compared to the GLP-1R agonistic activity of a native GLP-1(7-36) (SEQ ID NO: 260), wherein the GLP-1R agonistic peptide comprises or consists of the amino acid sequence

(SEQ ID NO: 635)
X₁-G-E-G-T-F-T-S-D-X₁₀-S-X₁₂-X₁₃-L-X₁5-X₁₆-X₁₇-X₁₈-X₁₉-
X₂₀-X₂₁-F-X₂₃-E-W-L-X₂₇-X₂₈-X₂₉-G,

wherein

### X₁ is H, Y or F,

### X₁₀ is K or L,

### X₁₂ is K, I or Q,

### X₁₃ is Q or L,

### X₁₅ is E, A or D,

### X₁₆ is E, K or S,

### X₁₇ is E, R or Q,

### X₁₈ is L, A or R,

### X₁₉ is V, A or F,

### X₂₀ is R, H, Q, K or I,

### X₂₁ is L, E, H or R,

### X₂₃ is I, Y or F,

### X₂₇ is I, L, K or E,

### X₂₈ is A, K, N or E, and

### X₂₉ is G, T, K or V;

[0005] wherein, optionally, the amino acid sequence further comprises at least one additional amino acid residue at its N-terminus; and
wherein, optionally, the amino acid sequence further comprises a peptide extension consisting of up to about 12, about 11 or about 10 amino acid residues at its C-terminus.

[0006] In one embodiment, the GLP-1R agonistic peptide comprises or consists of the amino acid sequence

(SEQ ID NO: 636)
H-G-E-G-T-F-T-S-D-X₁₀-S-K-Q-L-E-E-E-X₁₈-V-X₂₀-L-F-I-
E-W-L-K-A-X₂₉-G,

wherein

### X₁₀ is K or L,

### X₁₈ is A or R,

### X₂₀ is R or Q, and

### X₂₉ is G or T;

[0007] wherein, optionally, the amino acid sequence further comprises at least one additional amino acid residue at its N-terminus; and
wherein, optionally, the amino acid sequence further comprises a peptide extension consisting of up to about 12, about 11 or about 10 amino acid residues at its C-terminus.

[0008] In one embodiment, the at least one additional amino acid residue is G or A. In one embodiment, the at least one additional amino acid residue is a single amino acid residue. In one embodiment, the at least one additional amino acid residue is G.

[0009] In one embodiment, the peptide extension comprises or consists of an amino acid sequence selected from the group consisting of SEQ ID NOs: 566 to 621. In one embodiment, the peptide extension is a single amino acid residue, e.g., P. In one embodiment, the peptide extension comprises or consists of the amino acid sequence PSSGAPPPS (SEQ ID NO: 605) or PKKIRYS (SEQ ID NO: 598).

[0010] In another aspect, the present invention relates to a GLP-1R agonistic peptide having a GLP-1R agonistic activity which is about 9- to about 531-fold reduced as compared to the GLP-1R agonistic activity of native GLP-1(7-36) (SEQ ID NO: 260), wherein the GLP-1R agonistic peptide comprises or consists of an amino acid sequence selected from the group consisting of SEQ ID NOs: 261 to 552 and 554 to 565, or an amino acid sequence selected from the group consisting of SEQ ID NOs: 261 to 552 and 554 to 565, with up to three substitutions of amino acid residues.

[0011] In one embodiment, the GLP-1R agonistic peptide has a GLP-1R agonistic activity which is about 9- to about 531-fold reduced as compared to the GLP-1R agonistic activity of native GLP-1(7-36) (SEQ ID NO: 260) when the GLP-1R agonistic peptide is in its isolated form and/or when the GLP-1R agonistic peptide is part of a fusion molecule.

[0012] In one embodiment, the GLP-1R agonistic peptide has a GLP-1R agonistic activity which is about 9- to about 482-fold (or about 9.449- to about 482.396-fold) or about 9- to about 319-fold (or about 9.449- to about 319.311-fold) or about 9- to about 121-fold (or about 9.449- to about 121.189-fold) reduced as compared to the GLP-1R agonistic activity of native GLP-1(7-36).

[0013] In one embodiment, the GLP-1R agonistic peptide has a GLP-1R agonistic activity which is about 9- to about 319-fold reduced as compared to the GLP-1R agonistic activity of native GLP-1(7-36).

[0014] In one embodiment, the GLP-1R agonistic peptide has a GLP-1R agonistic activity which is at least about 9.4-fold or at least about 9.45-fold or at least about 9.5-fold reduced as compared to the GLP-1R agonistic activity of native GLP-1(7-36).

[0015] In one embodiment, the GLP-1R agonistic peptide has a GLP-1R agonistic activity which is at least about 10-fold reduced as compared to the GLP-1R agonistic activity of native GLP-1(7-36).

[0016] In one embodiment, the GLP-1R agonistic peptide has a GLP-1R agonistic activity which is at most about 482.4-fold or at most about 482.35-fold reduced as compared to the GLP-1R agonistic activity of native GLP-1(7-36).

[0017] In one embodiment, the GLP-1R agonistic peptide has a GLP-1R agonistic activity which is at most about 482-fold reduced as compared to the GLP-1R agonistic activity of native GLP-1(7-36).

[0018] In one embodiment, the GLP-1R agonistic peptide has a GLP-1R agonistic activity which is about 10- to about 482-fold reduced as compared to the GLP-1R agonistic activity of native GLP-1(7-36).

[0019] In one embodiment, the GLP-1R agonistic peptide has a GLP-1R agonistic activity which is about 10- to about 319-fold reduced as compared to the GLP-1R agonistic activity of native GLP-1(7-36).

[0020] In one embodiment, the GLP-1R agonistic peptide has a GLP-1R agonistic activity which is about 90- to about 100-fold reduced as compared to the GLP-1R agonistic activity of native GLP-1(7-36).

[0021] In one embodiment, the GLP-1R agonistic peptide has a GLP-1R agonistic activity which is at least about 18-fold (or at least about 18.268-fold) reduced as compared to the GLP-1R agonistic activity of native GLP-1(7-36).

[0022] In one embodiment, the GLP-1R agonistic peptide has a GLP-1R agonistic activity which is about 18- to about 501-fold (or about 18.268- to about 500.686-fold) or about 18- to about 469-fold (or about 18.268- to about 468.679-fold) or about 18- to about 313-fold (or about 18.268- to about 313.214-fold) or about 18- to about 123-fold (or about 18.268- to about 123.466-fold) reduced as compared to the GLP-1R agonistic activity of native GLP-1(7-36).

[0023] In one embodiment, the GLP-1R agonistic peptide has a GLP-1R agonistic activity which is about 18- to about 313-fold reduced as compared to the GLP-1R agonistic activity of native GLP-1(7-36).

[0024] In one of the above embodiments, the GLP-1R agonistic peptide has a GLP-1R agonistic activity which is at least about 18.2-fold or at least about 18.3-fold reduced as compared to the GLP-1R agonistic activity of native GLP-1(7-36).

[0025] In one of the above embodiments, the GLP-1R agonistic peptide has a GLP-1R agonistic activity which is at least about 20-fold or at least about 50-fold or at least about 100-fold reduced as compared to the GLP-1R agonistic activity of native GLP-1(7-36).

[0026] In one embodiment, the GLP-1R agonistic peptide has a GLP-1R agonistic activity which is about 10-fold to about 500-fold reduced as compared to the GLP-1R agonistic activity of native GLP-1(7-36). In one embodiment, the GLP-1R agonistic peptide has a GLP-1R agonistic activity which is about 15-fold to about 500-fold reduced as compared to the GLP-1R agonistic activity of native GLP-1(7-36). In one embodiment, the GLP-1R agonistic peptide has a GLP-1R agonistic activity which is about 20-fold to about 500-fold reduced as compared to the GLP-1R agonistic activity of native GLP-1(7-36). In one embodiment, the GLP-1R agonistic peptide has a GLP-1R agonistic activity which is about 50-fold to about 500-fold reduced as compared to the GLP-1R agonistic activity of native GLP-1(7-36). In one embodiment, the GLP-1R agonistic peptide has a GLP-1R agonistic activity which is about 100-fold to about 500-fold reduced as compared to the GLP-1R agonistic activity of native GLP-1(7-36). In one embodiment, the GLP-1R agonistic peptide has a GLP-1R agonistic activity which is about 100-fold to about 300-fold reduced as compared to the GLP-1R agonistic activity of native GLP-1(7-36).

[0027] In one embodiment, the GLP-1R agonistic peptide as part of a fusion molecule activates human GLP-1R with an EC50 of about 15 pmol/L to about 400 pmol/L, or about 20 pmol/L to about 400 pmol/L, or about 50 pmol/L to about 400 pmol/L, or about 100 pmol/L to about 400 pmol/L, as determined, e.g., by measuring the cAMP response of cells stably expressing human GLP-1R. In one embodiment, activation of human GLP-1R is determined essentially as described in Example 4.

[0028] In one embodiment, the GLP-1R agonistic peptide in its isolated form activates human GLP-1R with an EC50 of about 7.5 pmol/L to about 250 pmol/L, or about 7.5 pmol/L to about 150 pmol/L, or about 7.5 pmol/L to about 100 pmol/L, or about 7.5 pmol/L to about 75 pmol/L, or about 8 pmol/L to about 75 pmol/L, or 9 about pmol/L to 75 about pmol/L, or 9 about pmol/L to 60 about pmol/L, as determined, e.g., by measuring the cAMP response of cells stably expressing human GLP-1R. In one embodiment, activation of human GLP-1R is determined essentially as described in Example 4.

[0029] In one embodiment, the GLP-1R agonistic peptide comprises or consists of an amino acid sequence selected from the group comprising or consisting of SEQ ID NOs: 261 to 552 and 554 to 565.

[0030] In one embodiment, the GLP-1R agonistic peptide comprises or consists of the amino acid sequence of SEQ ID NO: 261 or 262.

[0031] In one embodiment, the GLP-1R agonistic peptide does not comprise or consist of an amino acid sequence of any one of SEQ ID NOs: 553 and 622 to 634.

[0032] In another aspect, the present invention relates to a GLP-1R agonistic peptide comprising or consisting of an amino acid sequence selected from the group consisting of SEQ ID NOs: 261 to 552 and 554 to 565.

[0033] In another aspect, the present invention relates to a GLP-1R agonistic peptide comprising or consisting of an amino acid sequence of SEQ ID NO: 261 or comprising or consisting of an amino acid sequence of SEQ ID NO: 262 In another aspect, the present invention relates to a combination comprising a GLP-1R agonistic peptide as defined above and at least one other active pharmaceutical ingredient.

[0034] In another aspect, the present invention relates to a fusion molecule comprising a GLP-1R agonistic peptide as defined above and at least one other active pharmaceutical ingredient.

[0035] In one embodiment, the at least one other active pharmaceutical ingredient is an FGF21 compound.

[0036] In another aspect, the present invention relates to a nucleic acid molecule encoding a GLP-1R agonistic peptide as defined above or a fusion molecule as defined above.

[0037] In another aspect, the present invention relates to a host cell containing a nucleic acid molecule as defined above.

[0038] In another aspect, the present invention relates to a pharmaceutical composition comprising a GLP-1R agonistic peptide as defined above, a combination as defined above, a fusion molecule as defined above, a nucleic acid molecule as defined above or a host cell as defined above.

[0039] In another aspect, the present invention relates to a kit comprising a GLP-1R agonistic peptide as defined above, a combination as defined above, a fusion molecule as defined above, a nucleic acid molecule as defined above, a host cell as defined above or a pharmaceutical composition as defined above.

[0040] In another aspect, the present invention relates to a GLP-1R agonistic peptide as defined above, a combination as defined above, a fusion molecule as defined above, a nucleic acid molecule as defined above, a host cell as defined above or a pharmaceutical composition as defined above for use as a medicament.

[0041] In another aspect, the present invention relates to a GLP-1R agonistic peptide as defined above, a combination as defined above, a fusion molecule as defined above, a nucleic acid molecule as defined above or a host cell as defined above or a pharmaceutical composition as defined above for use in the treatment of a disease or disorder selected from the group consisting of obesity, being overweight, metabolic syndrome, diabetes mellitus, hyperglycemia, dyslipidemia, NASH and atherosclerosis.

[0042] In one embodiment, the disease or disorder is diabetes mellitus. In one embodiment, the diabetes mellitus is type 1 diabetes mellitus or type 2 diabetes mellitus.

[0043] In another aspect, the present invention relates to the use of a GLP-1R agonistic peptide as defined above, a combination as defined above, a fusion molecule as defined above, a nucleic acid molecule as defined above, a host cell as defined above or a pharmaceutical composition as defined above in the manufacture of a medicament for the treatment of a disease or disorder selected from the group consisting of obesity, being overweight, metabolic syndrome, diabetes mellitus, diabetic retinopathy, hyperglycemia, dyslipidemia, NASH and atherosclerosis.

[0044] In one embodiment, the disease or disorder is diabetes mellitus. In one embodiment, the diabetes mellitus is type 1 diabetes mellitus or type 2 diabetes mellitus.

[0045] In another aspect, the present invention relates to a method of treating a disease or disorder selected from the group consisting of obesity, being overweight, metabolic syndrome, diabetes mellitus, diabetic retinopathy, hyperglycemia, dyslipidemia, NASH and atherosclerosis, the method comprising administering a GLP-1R agonistic peptide as defined above, a combination as defined above, a fusion molecule as defined above, a nucleic acid molecule as defined above, a host cell as defined above or a pharmaceutical composition as defined above to a subject in need thereof.

[0046] In one embodiment, the disease or disorder is diabetes mellitus. In one embodiment, the diabetes mellitus is type 1 diabetes mellitus or type 2 diabetes mellitus.

### DESCRIPTION OF THE FIGURES

[0047] FIG. 1 is a graph showing EC50 of the adverse effect (Gastric Emptying (GE) rate) and pharmacodynamics (i.e., HbA1c, Triglycerides, Fatty Acids, Non-HDL, Adipose Mass) depending on the GLP-1 attenuation factor (12-months simulation):
[0048] For GLP-1 attenuation factors greater than 9.449 (which can be rounded to about 9), the EC50 of GLP-1-mediated gastrointestinal adverse effect (gastric emptying; GE-Rate) was greater than EC50 of pharmacodynamic effects (i.e., HbA1c, Adipose Mass, Non-HDL, Fatty Acids, Triglycerides);
[0049] The maximal distance between maximum of pharmacodynamics (HbA1c) and adverse effect (GE rate) normalized by spreading of FGF21- (lipids) and GLP-1-mediated effects (HbA1c) was 121.189; i.e., at 121.189 (which can be rounded to about 121), there is a maximal distance between maximum of pharmacodynamics effects (HbA1c) and adverse effect (GE rate) at a minimum distance between GLP-1-mediated effects (HbA1c) and mean FGF21-mediated effects (i.e., Adipose Mass, Non-HDL, Fatty Acids, Triglycerides) (see FIG. 2);
[0050] The maximal distance between maximum of pharmacodynamics (HbA1c) and adverse effect (GE rate) was 319.311 (which can be rounded to about 319);
[0051] The maximal distance between mean pharmacodynamics (i.e., HbA1c, Adipose Mass, Non-HDL, Fatty Acids, Triglycerides) and adverse effect (GE rate) was 482.396 (see FIG. 2; which can be rounded to about 482);
[0052] The maximum gastric emptying rate was 531.0;
   (all: vertical lines).

[0053] FIG. 2 is a graph showing the EC50 for GE rate and mean pharmacodynamic effects (i.e., HbA1c, Triglycerides, Fatty Acids, Non-HDL, Adipose Mass) depending on GLP-1 attenuation factor (12-months simulation):
[0054] The maximal distance between mean pharmacodynamics (i.e., HbA1c, Adipose Mass, Non-HDL, Fatty Acids, Triglycerides) and adverse effect (GE-Rate) was 482.396 (right vertical line; which can be rounded to about 482);
[0055] The maximal distance between maximum of pharmacodynamics (HbA1c) and adverse effect (GE rate) normalized by spreading of FGF21- (lipids) and GLP-1-mediated effects (HbA1c) was 121.189 (left vertical line; which can be rounded to about 121). The curve “(Max-GE Rate)/Range” represents the ratio between the maximum distance between HbA1c and GE rate and the minimum distance between HbA1c and mean FGF21-mediated effects (i.e., Adipose Mass, Non-HDL, Fatty Acids, Triglycerides). At the minimum of the “(Max-GE Rate)/Range” curve (i.e., at 121.189), there is a maximal distance between maximum of pharmacodynamics effects (HbA1c) and adverse effect (GE rate) at a minimum distance between GLP-1-mediated effects (HbA1c) and FGF21-mediated effects (i.e., Adipose Mass, Non-HDL, Fatty Acids, Triglycerides).

[0056] FIG. 3 is a graph showing EC50 of the adverse effect (GE rate) and pharmacodynamics (HbA1c, Triglycerides, Fatty Acids, Non-HDL, Adipose Mass) depending on GLP-1 attenuation factor (3-months simulation):
[0057] For GLP-1 attenuation factors greater than 18.268 (which can be rounded to about 18), the EC50 of GLP-1-mediated gastrointestinal adverse effect (gastric emptying; GE-Rate) was greater than the EC50 of pharmacodynamic effects (i.e., HbA1c, Adipose Mass, Non-HDL, Fatty Acids, Triglycerides);
[0058] The maximal distance between maximum of pharmacodynamics (HbA1c) and adverse effect (GE rate) normalized by spreading of FGF21- (lipids) and GLP-1-mediated effects (HbA1c) was 123.466; i.e., at 123.466 (which can be rounded to about 123), there is a maximal distance between maximum of pharmacodynamics effects (HbA1c) and adverse effect (GE rate) at a minimum distance between GLP-1-mediated effects (HbA1c) and mean FGF21-mediated effects (i.e., Adipose Mass, Non-HDL, Fatty Acids, Triglycerides) (see FIG. 4);
[0059] The maximal distance between maximum of pharmacodynamics (HbA1c) and adverse effect (GE-Rate) was 313.214 (which can be rounded to about 313);
[0060] The maximal distance between mean pharmacodynamics (i.e., HbA1c, Adipose Mass, Non-HDL, Fatty Acids, Triglycerides) and adverse effect (GE-Rate) was 468.679 (see FIG. 4; which can be rounded to about 469);
[0061] The maximum GE rate was at 500.686 (which can be rounded to about 501) (all: vertical lines).

[0062] FIG. 4 is a graph showing the EC50 of GE rate and mean pharmacodynamic effects (i.e., HbA1c, Triglycerides, Fatty Acids, Non-HDL, Adipose Mass) depending on GLP-1 attenuation factor (3-months simulation):
[0063] The maximal distance between mean pharmacodynamics (i.e., HbA1c, Adipose Mass, Non-HDL, Fatty Acids, Triglycerides) and adverse effect (GE-Rate) was 468.679 (right vertical line; which can be rounded to about 469);
[0064] The maximal distance between maximum of pharmacodynamics (HbA1c) and adverse effect (GE rate) normalized by spreading of FGF21- (lipids) and GLP-1-mediated effects (HbA1c) was 123.466 (left vertical line; which can be rounded to about 123). The curve “(Max-GE Rate)/Range” represents the ratio between the maximum distance between HbA1c and GE rate and the minimum distance between HbA1c and mean FGF21-mediated effects (i.e., Adipose Mass, Non-HDL, Fatty Acids, Triglycerides). At the minimum of the “(Max-GE Rate)/Range” curve (i.e., at 123.466), there is a maximal distance between maximum of pharmacodynamics effects (HbA1c) and adverse effect (GE rate) at a minimum distance between GLP-1-mediated effects (HbA1c) and FGF21-mediated effects (i.e., Adipose Mass, Non-HDL, Fatty Acids, Triglycerides).

[0065] FIGS. 5 (A and B) are graphs showing the results of an in vitro cellular assay (In-Cell Western (ICW)) for human FGF21 receptor efficacy in CHO cells. pFGFR is depicted in (A), and pERK is depicted in (B).

[0066] FIGS. 6 (A to D) are graphs showing the results of an in vitro cellular assay for human Glucagon-Like-Peptide 1 (GLP-1) receptor efficacy in HEK-293 cells for different GLP-1R agonists. SEQ ID NO: 2 is depicted in (A), SEQ ID NO: 7 is depicted in (B), SEQ ID NO: 8 is depicted in (C), and SEQ ID NOs: 2, 7, and 8 are depicted in (D).

[0067] FIGS. 7 (A to F) are graphs showing plasma concentrations of GLP-1R agonist/FGF21 Fc fusion proteins after single subcutaneous administration of a 0.3 mg/kg solution to female C57BI/6 mice or male cynomolgus monkeys using three different bioanalytical methods. (A) depicts SEQ ID NO: 2 in mouse, (B) depicts SEQ ID NO: 2 in monkey, (C) depicts SEQ ID NO: 7 in mouse, (D) depicts SEQ ID NO: 7 in monkey, (E) depicts SEQ ID NO: 8 in mouse, and (F) depicts SEQ ID NO: 8 in monkey.

[0068] FIG. 8 is a graph showing shows plasma concentrations of GLP-1R agonist/FGF21 Fc fusion proteins and G-FGF21 (SEQ ID NO: 252) after single subcutaneous administration of a 0.3 mg/kg solution to female C57BI/6 mice using a bioanalytical method for quantification of the intact full-length proteins.

[0069] FIG. 9 is a graph showing the development of body weight in female Diet-Induced Obesity (DIO) mice with once weekly dosing of GLP-1RA/FGF21 Fc fusion proteins and controls for 28 days.

[0070] FIG. 10 is a graph showing the development of cumulative food intake in female DIO mice with once weekly dosing of GLP-1 RA/FGF21 Fc fusion proteins and controls for 28 days.

[0071] FIGS. 11 (A and B) are graphs showing the 24 hour blood glucose profile of db/db mice following the first treatment with GLP-1RA/FGF21 Fc fusion proteins and controls starting on day 1 (A) or following the fourth treatment starting on day 22 (B). Data are means±SEM; n=8/group.

[0072] FIG. 12 is a graph showing the plasma HbA1c content in female db/db mice with a once weekly dosing of GLP-1RA/FGF21 Fc fusion proteins and controls for 36 days.

[0073] FIGS. 13 (A and B) are graphs showing the development of liver weight and lipid contents in DIO NASH mice after once weekly dosing of a GLP-1RA/FGF21 Fc fusion protein and controls for 8 weeks. (A) depicts liver weight and lipid levels, (B) depicts liver cholesterol and liver triglyceride levels.

[0074] FIG. 14 depicts graphs showing the development of the development of fibrosis and Non-Alcoholic Fatty Liver Disease (NAFLD) activity score in DIO NASH mice after once weekly dosing of a GLP-1 RA/FGF21 Fc fusion protein and controls for 8 weeks.

[0075] FIG. 15 depicts graphs showing the number of animals with higher, the same or lower fibrosis and NAFLD activity score in DIO NASH mice after once weekly dosing of a GLP-1RA/FGF21 Fc fusion protein and controls for 8 weeks.

### DETAILED DESCRIPTION OF THE INVENTION

[0076] Although the present invention is described in detail below, it is to be understood that this invention is not limited to the particular methodologies, protocols and reagents described herein, as these may vary. It is also to be understood that the terminology used herein is for the purpose of describing particular embodiments only, and is not intended to limit the scope of the present invention, which will be limited only by the appended claims. Unless defined otherwise, all technical and scientific terms used herein have the same meanings as commonly understood by one of ordinary skill in the art.

[0077] Certain elements of the present invention will be described in more detail herein. These elements may be listed with specific embodiments; however, it should be understood that particular specific embodiments may be combined in any manner and in any number to create additional embodiments. The variously described examples and exemplary embodiments should not be construed to limit the present invention to only the explicitly described embodiments. This description should be understood to support and encompass embodiments which combine the explicitly described embodiments with any number of the disclosed and/or exemplary elements. Furthermore, any permutations and combinations of all described elements in this application should be considered disclosed by the description of the present application unless the context indicates otherwise.

[0078] The terms used herein are defined as described in “A multilingual glossary of biotechnological terms: (IUPAC Recommendations)”, H. G. W. Leuenberger, B. Nagel, and H. Kölbl, Eds., Helvetica Chimica Acta, CH-4010 Basel, Switzerland, (1995).

[0079] The practice of the present invention will employ, unless otherwise indicated, conventional methods of chemistry, biochemistry, cell biology, immunology, and recombinant DNA techniques which are explained in the literature in the field (Sambrook, J. et al. (2001) Molecular Cloning: A Laboratory Manual, 3rd Ed., Cold Spring Harbor Laboratory Press, Cold Spring Harbor, N.Y.).

[0080] Throughout this specification and the claims which follow, unless the context requires otherwise, the word “comprise”, and variations such as “comprises” and “comprising”, will be understood to imply the inclusion of a stated member, integer or step or group of members, integers or steps but not the exclusion of any other member, integer or step or group of members, integers or steps although in some embodiments such other member, integer or step or group of members, integers or steps may be excluded, i.e., the subject-matter consists in the inclusion of a stated member, integer or step or group of members, integers or steps. The terms “a” and “an” and “the” and and the like, used in the context of describing the invention (especially in the context of the claims), are to be construed to cover both the singular and the plural, unless otherwise indicated herein or clearly contradicted by context. Recitation of ranges of values herein is merely intended to serve as a shorthand method of referring individually to each separate value falling within the range. Unless otherwise indicated herein, each individual value is incorporated into the specification as if it was individually recited herein. All methods described herein can be performed in any suitable order unless otherwise indicated herein or otherwise clearly contradicted by context. The use of any and all examples, or exemplary language (e.g., “such as”), provided herein is intended merely to better illustrate the invention and does not pose a limitation on the scope of the invention otherwise claimed. No language in the specification should be construed as indicating any non-claimed element essential to the practice of the invention.

[0081] Several documents are cited throughout the text of this specification. Each of the documents cited herein (including all patents, patent applications, scientific publications, manufacturer's specifications, instructions, etc.), whether supra or infra, is hereby incorporated by reference in its entirety. Nothing herein is to be construed as an admission that the invention is not entitled to antedate such disclosure by virtue of prior invention.

[0082] The term “GLP-1R agonistic peptide”, as used herein, refers to a peptide which binds to and activates the GLP-1 receptor, such as GLP-1 (as the primary GLP-1R agonist). GLP-1R agonistic peptides may also be simply referred to as “GLP-1R agonists” herein.

[0083] The term “peptide”, as used herein, generally refers to a polymeric form of amino acids of any length, for example, comprising about two or more, or about 3 or more, or about 4 or more, or about 6 or more, or about 8 or more, or about 9 or more, or about 10 or more, or about 13 or more, or about 16 or more, or about 21 or more amino acids joined covalently by peptide bonds. A peptide may, for example, consist of up to about 100 amino acids. The term “polypeptide”, as used herein, refers to large peptides. In one embodiment, the term “polypeptide” refers to peptides with more than about 100 amino acid residues. The terms “polypeptide” and “protein” are used interchangeably herein.

[0084] The term “amino acid” or “amino acid residue”, as used herein, refers to a naturally occurring amino acid, an unnatural amino acid, an amino acid analogue and/or an amino acid mimetic that functions in a manner similar to the naturally-occurring amino acid in its D or L stereoisomer if its structure allows such stereoisomeric forms. Amino acids are referred to herein by either their name, their art-known three letter symbols or by the one-letter symbols recommended by the IUPAC-IUB Biochemical Nomenclature Commission.

[0085] The term “naturally occurring”, as used herein, when used in connection with biological materials such as nucleic acid molecules, (poly-)peptides, host cells, and the like, refers to materials which are found in nature and are not manipulated by man.

[0086] When used in connection with amino acids, the term “naturally occurring” refers to the 20 conventional amino acids (i.e., alanine (Ala or A), cysteine (Cys or C), aspartic acid (Asp or D), glutamic acid (Glu or E), phenylalanine (Phe or F), glycine (Gly or G), histidine (His or H), isoleucine (Ile or I), lysine (Lys or K), leucine (Leu or L), methionine (Met or M), asparagine (Asn or N), proline (Pro or P), glutamine (Gln or Q), arginine (Arg or R), serine (Ser or S), threonine (Thr or T), valine (Val or V), tryptophan (Trp or W), and tyrosine (Tyr or Y)), as well as selenocysteine, pyrrolysine (PYL), and pyrroline-carboxylysine (PCL).

[0087] The term “unnatural amino acid”, as used herein, is meant to refer to an amino acids that is not naturally encoded or found in the genetic code of any organism. It may, for example, be a purely synthetic compound. Examples of unnatural amino acids include, but are not limited to, hydroxyproline, gamma-carboxyglutamate, O-phosphoserine, azetidinecarboxylic acid, 2-aminoadipic acid, 3-aminoadipic acid, beta-alanine, aminopropionic acid, 2-aminobutyric acid, 4-aminobutyric acid, 6-aminocaproic acid, 2-aminoheptanoic acid, 2-aminoisobutyric acid, 3-aminoisobutyric acid, 2-aminopimelic acid, tertiary-butylglycine, 2,4-diaminoisobutyric acid, desmosine, 2,2′-diaminopimelic acid, 2,3-diaminoproprionic acid, N-ethylglycine, N-methylglycine, N-ethylasparagine, homoproline, hydroxylysine, allo-hydroxylysine, 3-hydroxyproline, 4-hydroxyproline, isodesmosine, allo-isoleucine, N-methylalanine, N-methylglycine, N-methylisoleucine, N-methylpentylglycine, N-methylvaline, naphthalanine, norvaline, norleucine, ornithine, D-ornithine, D-arginine, p-aminophenylalanine, pentylglycine, pipecolic acid and thioproline.

[0088] The term “amino acid analogue”, as used herein, refers to a compound that has the same basic chemical structure as a naturally occurring amino acid. Amino acid analogues include the natural and unnatural amino acids which are chemically blocked, reversibly or irreversibly, or chemically modified, e.g., at one or any combination of their C-terminal carboxy group, their N-terminal amino group and/or their side-chain functional groups. Such analogues include, but are not limited to, methionine sulfoxide, methionine sulfone, S-(carboxymethyl)-cysteine, S-(carboxymethyl)-cysteine sulfoxide, S-(carboxymethyl)-cysteine sulfone, aspartic acid-(betamethylester), N-ethylglycine, alanine carboxamide, homoserine, norleucine and methionine methyl sulfonium.

[0089] The term “amino acid mimetic”, as used herein, refers to a chemical compound that has a structure that is different from the general chemical structure of an amino acid, but functions in a manner similar to a naturally-occurring amino acid.

[0090] The term “native GLP-1(7-36)”, as used herein, refers to a peptide having the amino acid sequence of SEQ ID NO: 260, which, optionally, comprises an amide group at its C-terminus.

[0091] In one embodiment, the term “GLP-1R agonistic activity” (or “GLP-1R agonistic potency”), as used herein, refers to the activation of the GLP-1 receptor. In one embodiment, the term refers to the agonistic activity/potency in vitro. In another embodiment, the term refers to the agonistic activity/potency in vivo. In one embodiment, activation of the GLP-1 receptor is determined by measuring the cAMP response of cells stably expressing GLP-1 receptor upon contact with the agonist in vitro. In one embodiment, the cells are from a HEK-293 cell line. In one embodiment, the GLP-1 receptor is human GLP-1 receptor. In one embodiment, activation of the GLP-1 receptor is determined essentially as described in Example 4. In one embodiment, the activity/potency is quantified by determining the EC50 value.

[0092] The present invention provides GLP-1R agonistic peptides according to the general formulae of SEQ ID NOs: 635 and 636 as defined herein.

[0093] In some embodiments, the GLP-1R agonistic peptides according to the general formulae of SEQ ID NOs: 635 and 636 comprise at least one additional amino acid residue at their N-terminus. In one embodiment, the at least one additional amino acid residue is a single amino acid residue. In one embodiment, the at least one additional amino acid residue is selected from the group consisting of: naturally occurring amino acids except proline; unnatural amino acids; amino acid analogues; and amino acid mimetics. In one embodiment, the at least one additional amino acid residue is selected from the group consisting of G, A, N and C. In one embodiment, the at least one additional amino acid residue is G or A. In one embodiment, the at least one additional amino acid residue is G.

[0094] In some embodiments, GLP-1R agonistic peptides according to the general formulae of SEQ ID NOs: 635 and 636 comprise a peptide extension at their C-terminus. The peptide extension may, for example, consist of up to about 12, about 11, about 10 or about 9 amino acid residues (e.g., about 7, about 8 or about 9 amino acid residues). In one embodiment, the peptide extension consists of an amino acid sequence selected from the group consisting of SEQ ID NOs: 566 to 621. In one embodiment, the peptide extension is a single amino acid residue, e.g., P.

[0095] The present invention also provides GLP-1R agonistic peptides comprising or consisting of an amino acid sequence selected from the group consisting of SEQ ID NOs: 261 to 552 and 554 to 565 as well as variants of these amino acid sequences which differ from the original sequences in the substitution of one, two or three amino acid residues.

[0096] The present invention also provides GLP-1R agonistic peptides comprising or consisting of an amino acid sequence that is SEQ ID NO: 261 or SEQ ID NO: 262 as well as variants of these amino acid sequences which differ from the original sequences in the substitution of one, two or three amino acid residues.

[0097] In one embodiment, the substituted amino acid residue(s) is/are not involved in the GLP-1R agonistic activity of the GLP-1R agonistic peptide. In one embodiment, the substitution(s) is/are functionally and/or phenotypically silent. In one embodiment, the substitution(s) is/are (a) conservative amino acid substitution(s).

[0098] As used herein, the term “conservative amino acid substitution” refers to a substitution of one or more amino acids with one or more amino acids of the same family of amino acids, i.e., amino acids which are related in their side chains (e.g., in terms of the electrical charge and/or size). Naturally occurring amino acids are generally divided into four families: acidic (aspartate, glutamate); basic (lysine, arginine, histidine); non-polar (alanine, valine, leucine, isoleucine, proline, phenylalanine, methionine, tryptophan); and uncharged polar (glycine, asparagine, glutamine, cysteine, serine, threonine, tyrosine). Phenylalanine, tryptophan, and tyrosine are sometimes classified jointly as aromatic amino acids.

[0099] The GLP-1R agonistic peptides may be fused or conjugated to a half-life extension module. “Half-life”, as used herein, generally refers to the period of time which is needed to eliminate half of the activity of a compound, the amount of a compound, or number of molecules, e.g., in vivo. Such modules are known to a person skilled in the art and include, for example, polymers (e.g., PolyEthylene Glycol (PEG), HydroxyEthyl Starch (HES), hyaluronic acid, polysialic acid), unstructured (poly-)peptide chains, Elastin-Like Polypeptides (ELPs), serum proteins (e.g., albumin, such as Human Serum Albumin (HAS)), serum protein binding molecules (e.g., an Albumin Binding Domain (ABD), an albumin binding fatty acid), antibodies, immunoglobulins, Fc domains (also referred to as Fc regions) of immunoglobulins and immunoglobulin binding domains.

[0100] The term “unstructured (poly-)peptide chain”, as used herein, refers to a (poly-)peptide chain which lacks a fixed or ordered three-dimensional structure and is typically hydrophilic. Unstructured (poly-)peptide chains that extend the half-life (e.g., the in vivo half-life) of peptides and proteins they are fused to are known to a person skilled in the art and include, for example, XTEN (Schellenberger V. et al. (2009) Nat Biotechnol. 27(12): 1186-90) and PAS sequences (Schlapschy M. et al. (2013) Protein Eng Des Sel. 26(8): 489-501).

[0101] The term “fused to”, as used herein, refers, in particular, to genetic fusion, e.g., by recombinant DNA technology. The amino acid sequence of a (poly)peptide half-life extension module may be introduced at any position within the amino acid sequence of the GLP-1R agonistic peptide, and may, for example, take the shape of a loop within the encoded peptide structure, or it may be N-terminally or C-terminally fused. The amino acid sequence of the (poly)peptide half-life extension module fused to the GLP-1R agonistic peptide may be encoded by a polynucleotide.

[0102] The term “conjugated to”, as used herein, refers to chemical and/or enzymatic conjugation resulting in a stable covalent link between a (poly-)peptide and another molecule, e.g., the GLP-1R agonistic peptide and the half-life extension module. Such conjugation may occur at the N- or C-terminus or at particular side chains of a (poly-)peptide, e.g., at lysine, cysteine, tyrosine or an unnatural amino acid residue.

[0103] The term “combination”, as used herein, is meant to include means that allow to apply the combination comprising the GLP-1R agonistic peptide and the at least one other active pharmaceutical ingredient either by separate administration of the GLP-1R agonistic peptide and the at least one other active pharmaceutical ingredient to the patient or in the form of combination products in which the GLP-1R agonistic peptide and the at least one other active pharmaceutical ingredient are present, e.g., in one pharmaceutical composition or in the form of a fusion molecule. When administered separately, administration may occur simultaneously or sequentially, in any order. The amount of the GLP-1R agonistic peptide and the at least one other active pharmaceutical ingredient as well as the relative timings of administration will be selected in order to achieve the desired combined therapeutic effect. The administration of the combination may be concomitantly in: (1) a unitary pharmaceutical composition including all active pharmaceutical ingredients; or (2) separate pharmaceutical compositions each including at least one of the active pharmaceutical ingredients. Alternatively, the combination may be administered separately in a sequential manner wherein one treatment agent is administered first and the other second or vice versa. Such sequential administration may be close in time or remote in time. In one embodiment, the combination is provided in the form of a kit, e.g., a kit as defined herein.

[0104] The term “fusion molecule”, as used herein, generally refers to a molecule created by joining, in particular covalently linking, two or more distinct molecules (e.g., proteins and/or peptides and/or combinations thereof) resulting in the formation of a single molecule. In certain exemplary embodiments, the fusion molecule will have one or more functional properties derived from each of the original molecules. In the case of proteins and/or peptides, the fusion molecule is also referred to as “fusion protein”. Fusion molecules may be generated by genetic fusion (e.g., by recombinant DNA technology) or by chemical and/or enzymatic conjugation, e.g., of two or more polypeptide, proteins, or any combination thereof. The two or more distinct molecules may also be linked by one or more suitable linker molecules, e.g., peptide linkers and/or non-peptidic polymers, such as PEG.

[0105] In one embodiment, peptide linkers have a length of about 2 to about 100 amino acid residues, or about 2 to about 90 amino acid residues, or about 2 to about 80 amino acid residues, or about 2 to about 70 amino acid residues, or about 2 to about 60 amino acid residues, or about 2 to about 50 amino acid residues, or about 2 to about 40 amino acid residues, or about 2 to about 30 amino acid residues, or about 2 to about 25 amino acid residues, or about 2 to about 20 amino acid residues. In one embodiment, the peptide linker comprises at least about 5 amino acid residues. In general, peptide linkers are designed to provide flexibility and protease resistance. In one embodiment, the peptide linker is a glycine-serine-rich linker, wherein, e.g., at least about 50%, at least about 60%, at least about 70%, at least about 80%, at least about 85% of the amino acids are a glycine or serine residue, respectively. In another embodiment, the amino acids are selected from glycine and serine, i.e., the peptide linker is exclusively composed of glycine and serine (referred to as a glycine-serine linker). In one embodiment, the peptide linker further comprises an alanine residue at its C-terminus. Peptide linkers may further comprise one or more specific protease cleavage sites. In one embodiment, the peptide linker comprises or consists of an amino acid sequence selected from the group consisting of SEQ ID NOs: 231 to 245.

[0106] In one embodiment, a fusion molecule further comprises an Fc domain (also referred to as Fc region) of an immunoglobulin (e.g., IgG1 or IgG4) or a variant thereof. In one embodiment, the variant of the Fc domain comprises up to about 6, about 5 or about 4 mutations as compared to the wild-type sequence of the Fc domain. In one embodiment, said mutations are selected from the group consisting of amino acid substitutions, amino acid additions and amino acid deletions, e.g., N- or C-terminal deletions. In one embodiment, the Fc domain or variant thereof can have greater than about 50%, about 60%, about 70%, about 80%, about 90%, about 93%, about 95%, about 96%, about 97%, about 98% or about 99% sequence identity or can have about 100% sequence identity to the wild-type sequence of the IgG1 Fc region, e.g., the human IgG1 Fc region. In one embodiment, the Fc domain or variant thereof can have greater than about 50%, about 60%, about 70%, about 80%, about 90%, about 93%, about 95%, about 96%, about 97%, about 98% or about 99% sequence identity or can have about 100% sequence identity to the wild-type sequence of the IgG4 Fc region, e.g., the human IgG4 Fc region. In one embodiment, the Fc domain of an immunoglobulin or a variant thereof comprises or consists of an amino acid sequence selected from the group consisting of SEQ ID NOs: 257, 258 and 259.

[0107] In one embodiment, a fusion molecule comprises a linker molecule comprising a structure selected from the group consisting of L-Fc, Fc-L, L₁-Fc-L₂ and Fc, wherein L, L₁ and L₂ are independently selected from the group consisting of single amino acids and peptides (e.g., peptide linkers as defined herein), and Fc is an Fc domain of an immunoglobulin or a variant thereof. L₁ and L₂ may be the same or different. In one embodiment, L₁ and L₂ are different. In one embodiment, L₁ comprises or consists of the amino acid sequence of SEQ ID NO: 232, and L₂ comprises or consists of the amino acid sequence of SEQ ID NO: 231, or vice versa.

[0108] The phrase “fibroblast growth factor 21” or “FGF21”, as used herein, refers to any FGF21 protein known in the art and particularly refers to human FGF21. In one embodiment, human FGF21 has the amino acid sequence of SEQ ID NO: 250 (full-length human wild-type FGF21). Mature human wild-type FGF21, i.e., a human wild-type FGF21 lacking amino acids 1 to 28 (M1 to A28) of SEQ ID NO: 250 (i.e., its signal sequence/peptide), is set forth as SEQ ID NO: 251. Mature human wild-type FGF21 with an additional N-terminal Gly is represented by SEQ ID NO: 252 and is referred to herein as G-FGF21.

[0109] The phrase “FGF21 compound”, as used herein, generally refers to a compound having FGF21 activity.

[0110] In one embodiment, the phrase “FGF21 activity” (or “FGF21 potency”), as used herein, refers to activation of the FGF21 receptor (FGFR, e.g., FGFR1c). In one embodiment, the FGF21 receptor is a human FGF21 receptor. In one embodiment, FGF21 activity refers to activity and/or potency in vitro. In another embodiment, FGF21 activity refers to activity and/or potency in vivo. In one embodiment, activation of the FGF21 receptor is determined by measuring FGF21 receptor autophosphorylation and/or phosphorylation of MAPK ERK1/2 upon contact with the FGF21 compound in vitro. In one embodiment, autophosphorylation of human FGFR1c and/or phosphorylation of MAPK ERK1/2 is/are determined by using an In-Cell Western (ICW), e.g., essentially as described in Example 3. In one embodiment, the activity and/or potency is quantified by determining the EC50 value.

[0111] The term “In-Cell Western (ICW) assay”, as used herein, refers to an immunocytochemical assay, more particularly a quantitative immunofluorescence assay that is typically performed using microplates (e.g., in a 96- or 384-well format). ICW combines the specificity of Western blotting with the reproducibility and throughput of ELISA (see, for example, Aguilar H. N. et al. (2010) PLoS ONE 5(4): e9965). Appropriate ICW assay systems are commercially available (e.g., from LI-COR Biosciences, USA). In one embodiment, an anti-pFGFR antibody and/or an anti-pERK antibody is/are used in the ICW assay.

[0112] In one embodiment, the FGF21 compound is a peptidic compound, i.e., a peptide or protein. In one embodiment, the FGF21 compound is native FGF21 or an FGF21 variant having at least about 80% or at least about 90% or at least about 91% or at least about 92% or at least about 93% or at least about 94% or at least about 95% or at least about 96% or at least about 97% or at least about 98% amino acid sequence identity to the amino acid sequence of native FGF21. The term “native FGF21”, as used herein, refers to a naturally occurring FGF21, e.g., a human wild-type FGF21 with the amino acid sequence of SEQ ID NO: 250 or a mature human wild-type FGF21 with the amino acid sequence of SEQ ID NO: 251.

[0113] “Sequence identity”, as used herein, refers to the percentage of amino acids that are identical between two amino acid or nucleic acid sequences. The optimal alignment of the sequences for comparison may be produced manually, by means of the local homology algorithm of Smith and Waterman, 1981, Ads App. Math. 2, 482, by means of the local homology algorithm of Neddleman and Wunsch, 1970, J. Mol. Biol. 48, 443, by means of the similarity search method of Pearson and Lipman, 1988, Proc. Natl Acad. Sci. USA 85, 2444, or by means of computer programs which use these algorithms (GAP, BESTFIT, FASTA, BLAST P, BLAST N and TFASTA in Wisconsin Genetics Software Package, Genetics Computer Group, 575 Science Drive, Madison, Wis.).

[0114] In one embodiment, an FGF21 compound is a protein comprising or consisting of an amino acid sequence selected from the group consisting of SEQ ID NOs: 250 to 256.

[0115] Suitable FGF21 variants for use in the present invention are also described, e.g., in PCT/EP2016/079551, which is incorporated herein by reference.

[0116] In one embodiment, a fusion molecule is a fusion protein having the structure A-L₁-Fc-L₂-B, wherein A is a GLP-1R agonistic peptide, L₁, Fc and L₂ are as defined herein, and B is an FGF21 compound as defined herein. In one embodiment, the fusion molecule is a fusion protein comprising or consisting of an amino acid sequence selected from the group consisting of SEQ ID NOs: 1 to 230.

[0117] In general, the term “Active Pharmaceutical Ingredient” (API), as used herein, includes any pharmaceutically active chemical or biological compound and any pharmaceutically acceptable salt thereof and any mixture thereof, that provides some pharmacologic effect and is used for treating or preventing a condition, e.g., a disease or disorder, as defined herein.

[0118] Exemplary pharmaceutically acceptable salts include, but are not limited to, salts made from one or more of the following acids: hydrochloric acid (e.g., chloride salts), sulfuric acid (e.g., sulfate salts), nitric acid (e.g., nitrate salts), phosphoric acid (e.g., phosphate salts), hydrobromic acid (e.g., hydrobromide salts), maleic acid (e.g., maleate salts), malic acid (e.g., malate salts), ascorbic acid, citric acid (e.g., citrate salts), tartaric acid (e.g., tartrate salts), pamoic acid (e.g., pamoate or embonate salts), lauric acid (e.g., laurate salts), stearic acid (e.g., stearate salts), palmitic acid (e.g., palmitate slats), oleic acid, myristic acid (e.g., myristate salts), lauryl acid, naphthalinesulfonic acid, linolenic acid (e.g., linoleate salts), and the like.

[0119] As used herein, the terms “active pharmaceutical ingredient”, “active agent”, “active ingredient”, “active substance”, “therapeutically active compound” and “drug” are meant to be synonyms, i.e., have identical meaning.

[0120] In accordance with the present invention, an active pharmaceutical ingredient is optionally selected from:
[0121] all drugs mentioned in the Rote Liste 2014, e.g., all antidiabetics mentioned in the Rote Liste 2014, chapter 12, all weight-reducing agents or appetite suppressants mentioned in the Rote Liste 2014, chapter 06, all lipid-lowering agents mentioned in the Rote Liste 2014, chapter 58, all anti-hypertensives mentioned in the Rote Liste 2014 chapter 17, all nephroprotectives mentioned in the Rote Liste, or all diuretics mentioned in the Rote Liste 2014, chapter 36;
[0122] an FGF21 compound as defined herein;
[0123] a monoclonal antibody;
[0124] insulin and insulin derivatives, for example: insulin glargine (e.g., Lantus®), higher than 100 U/mL concentrated insulin glargine, e.g., 270-330 U/mL of insulin glargine or 300 U/mL of insulin glargine (as disclosed in EP 2387989), insulin glulisine (e.g., Apidra®), insulin detemir (e.g., Levemir®), insulin lispro (e.g., Humalog®, Liprolog®), insulin degludec (e.g., DegludecPlus®, IdegLira (NN9068)), insulin aspart and aspart formulations (e.g., NovoLog®), basal insulin and analogues (e.g., LY2605541, LY2963016, NN1436), PEGylated insulin lispro (e.g., LY-275585), long-acting insulins (e.g., NN1436, Insumera (PE0139), AB-101, AB-102, Sensulin LLC), intermediate-acting insulins (e.g., Humulin®N, Novolin®N), fast-acting and short-acting insulins (e.g., Humulin®R, Novolin®R, Linjeta® (VIAject®), PH20 insulin, NN1218, HinsBet®), premixed insulins, SuliXen®, NN1045, insulin plus Symlin®, PE-0139, ACP-002 hydrogel insulin, and oral, inhalable, transdermal and buccal or sublingual insulins (e.g., Exubera®, Nasulin®, Afrezza®, insulin tregopil, TPM-02 insulin, Capsulin®, Oral-lyn®, Cobalamin® oral insulin, ORMD-0801, Oshadi oral insulin, NN1953, NN1954, NN1956, VIAtab®). Also suitable are those insulin derivatives which are bonded to albumin or another protein by a bifunctional linker;
[0125] glucagon-like-peptide 1 (GLP-1), GLP-1 analogues, and GLP-1 receptor agonists, for example: GLP-1(7-37), GLP-1(7-36)amide, lixisenatide (e.g., Lyxumia®), exenatide (e.g., exendin-4, rExendin-4, Byetta®, Bydureon®, exenatide NexP), exenatide-LAR, liraglutide (e.g., Victoza®), semaglutide, taspoglutide, albiglutide, dulaglutide, albugon, oxyntomodulin, geniproside, ACP-003, CJC-1131, CJC-1134-PC, GSK-2374697, PB-1023, TTP-054, langlenatide (HM-11260C), CM-3, GLP-1 Eligen, AB-201, ORMD-0901, NN9924, NN9926, NN9927, Nodexen, Viador-GLP-1, CVX-096, ZYOG-1, ZYD-1, ZP-3022, CAM-2036, DA-3091, DA-15864, ARI-2651, ARI-2255, exenatide-XTEN (VRS-859), exenatide-XTEN+Glucagon-XTEN (VRS-859+AMX-808) and polymer-bound GLP-1 and GLP-1 analogues;
[0126] dual GLP-1/GIP agonists (e.g., RG-7697 (MAR-701), MAR-709, BHM081, BHM089, BHM098); dual GLP-1/glucagon receptor agonists (e.g., BHM-034, OAP-189 (PF-05212389, TKS-1225), TT-401/402, ZP2929, LAPS-HMOXM25, MOD-6030);
[0127] dual GLP-1/gastrin agonists (e.g., ZP-3022);
[0128] gastrointestinal peptides such as peptide YY 3-36 (PYY3-36) or analogues thereof and pancreatic polypeptide (PP) or analogues thereof;
[0129] glucagon receptor agonists or antagonists, glucose-dependent insulinotropic polypeptide (GIP) receptor agonists or antagonists, ghrelin antagonists or inverse agonists, xenin and analogues thereof;
[0130] dipeptidyl peptidase-IV (DPP-4) inhibitors, for example: alogliptin (e.g., Nesina®, Kazano®), linagliptin (e.g., Ondero®, Trajenta®, Tradjenta®, Trayenta®), saxagliptin (e.g., Onglyza®, Komboglyze XR®), sitagliptin (e.g., Januvia®, Xelevia®, Tesavel®, Janumet®, Velmetia®, Juvisync©, Janumet XR®), anagliptin, teneligliptin (e.g., Tenelia®), trelagliptin, vildagliptin (e.g., Galvus®, Galvumet®), gemigliptin, omarigliptin, evogliptin, dutogliptin, DA-1229, MK-3102, KM-223, KRP-104, PBL-1427, Pinoxacin hydrochloride, and Ar-2243;
[0131] sodium-dependent glucose transporter 2 (SGLT-2) inhibitors, for example: canagliflozin, dapagliflozin, remogliflozin, remogliflozin etabonate, sergliflozin, empagliflozin, ipragliflozin, tofogliflozin, luseogliflozin, ertugliflozin, EGT-0001442, LIK-066, SBM-TFC-039, and KGA-3235 (DSP-3235);
[0132] dual inhibitors of SGLT-2 and SGLT-1 (e.g., LX-4211, LIK066).
[0133] SGLT-1 inhibitors (e.g., LX-2761, KGA-3235) or SGLT-1 inhibitors in combination with anti-obesity drugs such as ileal bile acid transfer (IBAT) inhibitors (e.g., GSK-1614235+GSK-2330672);
[0134] biguanides (e.g., metformin, buformin, phenformin);
[0135] thiazolidinediones (e.g., pioglitazone, rosiglitazone), glitazone analogues (e.g., lobeglitazone);
[0136] Peroxisome Proliferator-Activated Receptors (PPAR-alpha, -gamma or -alpha/gamma) agonists or modulators (e.g., saroglitazar (e.g., Lipaglyn®), GFT-505), or PPAR gamma partial agonists (e.g., Int-131);
[0137] sulfonylureas (e.g., tolbutamide, glibenclamide, glimepiride, Amaryl®, glipizide) and meglitinides (e.g., nateglinide, repaglinide, mitiglinide);
[0138] alpha-glucosidase inhibitors (e.g., acarbose, miglitol, voglibose);
[0139] amylin and amylin analogues (e.g., pramlintide, Symlin®);
[0140] G-protein coupled receptor 119 (GPR119) agonists (e.g., GSK-1292263, PSN-821, MBX-2982, APD-597, ARRY-981, ZYG-19, DS-8500, HM-47000, YH-Chem1);
[0141] GPR40 agonists (e.g., TUG-424, P-1736, P-11187, JTT-851, GW9508, CNX-011-67, AM-1638, AM-5262);
[0142] GPR120 agonists and GPR142 agonists;
[0143] systemic or low-absorbable TGR5 (GPBAR1=G-protein-coupled bile acid receptor 1) agonists (e.g., INT-777, XL-475, SB756050);
[0144] diabetes immunotherapeutics, for example: oral C-C chemokine receptor type 2 (CCR-2) antagonists (e.g., CCX-140, JNJ-41443532), interleukin 1 beta (IL-1B) antagonists (e.g., AC-201), or oral monoclonal antibodies (mAbs) (e.g., methalozamide, VVP808, PAZ-320, P-1736, PF-05175157, PF-04937319);
[0145] anti-inflammatory agents for the treatment of the metabolic syndrome and diabetes, for example: nuclear factor kappa B inhibitors (e.g., Triolex®);
[0146] adenosine monophosphate-activated protein kinase (AMPK) stimulants, for example: Imeglimin (PXL-008), Debio-0930 (MT-63-78), R-118;
[0147] inhibitors of 11-beta-hydroxysteroid dehydrogenase 1 (11-beta-HSD-1) (e.g., LY2523199, BMS770767, RG-4929, BMS816336, AZD-8329, HSD-016, BI-135585);
[0148] activators of glucokinase (e.g., PF-04991532, TTP-399 (GK1-399), GKM-001 (ADV-1002401), ARRY-403 (AMG-151), TAK-329, TMG-123, ZYGK1);
[0149] inhibitors of diacylglycerol O-acyltransferase (DGAT) (e.g., pradigastat (LCQ-908)), inhibitors of protein tyrosine phosphatase 1 (e.g., trodusquemine), inhibitors of glucose-6-phosphatase, inhibitors of fructose-1,6-bisphosphatase, inhibitors of glycogen phosphorylase, inhibitors of phosphoenol pyruvate carboxykinase, inhibitors of glycogen synthase kinase, inhibitors of pyruvate dehydrogenase kinase;
[0150] modulators of glucose transporter-4, somatostatin receptor 3 agonists (e.g., MK-4256);
[0151] one or more lipid lowering agents are also suitable as combination partners, for example: 3-hydroxy-3-methylglutaryl-coenzym-A-reductase (HMG-CoA-reductase) inhibitors such as simvastatin (e.g., Zocor®, Inegy®, Simcor®), atorvastatin (e.g., Sortis®, Caduet®), rosuvastatin (e.g., Crestor®), pravastatin (e.g., Lipostat®, Selipran®), fluvastatin (e.g., Lescol®), pitavastatin (e.g., Livazo®, Livalo®), lovastatin (e.g., Mevacor®, Advicor®), mevastatin (e.g., Compactin®), rivastatin, cerivastatin (Lipobay®), fibrates such as bezafibrate (e.g., Cedur® retard), ciprofibrate (e.g., Hyperlipen®), fenofibrate (e.g., Antara®, Lipofen®, Lipanthyl®), gemfibrozil (e.g., Lopid®, Gevilon®), etofibrate, simfibrate, ronifibrate, clinofibrate, clofibride, nicotinic acid and derivatives thereof (e.g., niacin, including slow release formulations of niacin), nicotinic acid receptor 1 agonists (e.g., GSK-256073), PPAR-delta agonists, acetyl-CoA-acetyltransferase (ACAT) inhibitors (e.g., avasimibe), cholesterol absorption inhibitors (e.g., ezetimibe, Ezetrol®, Zetia®, Liptruzet®, Vytorin®, S-556971), bile acid-binding substances (e.g., cholestyramine, colesevelam), ileal bile acid transport (IBAT) inhibitors (e.g., GSK-2330672, LUM-002), microsomal triglyceride transfer protein (MTP) inhibitors (e.g., lomitapide (AEGR-733), SLx-4090, granotapide), modulators of proprotein convertase subtilisin/kexin type 9 (PCSK9) (e.g., alirocumab (REGN727/SAR236553), AMG-145, LGT-209, PF-04950615, MPSK3169A, LY3015014, ALD-306, ALN-PCS, BMS-962476, SPC5001, ISIS-394814, 1B20, LGT-210, 1D05, BMS-PCSK9Rx-2, SX-PCK9, RG7652), LDL receptor up-regulators, for example liver selective thyroid hormone receptor beta agonists (e.g., eprotirome (KB-2115), MB07811, sobetirome (QRX-431), VIA-3196, ZYT1), HDL-raising compounds such as: cholesteryl ester transfer protein (CETP) inhibitors (e.g., anacetrapib (MK0859), dalcetrapib, evacetrapib, JTT-302, DRL-17822, TA-8995, R-1658, LY-2484595, DS-1442), or dual CETP/PCSK9 inhibitors (e.g., K-312), ATP-binding cassette (ABC1) regulators, lipid metabolism modulators (e.g., BMS-823778, TAP-301, DRL-21994, DRL-21995), phospholipase A2 (PLA2) inhibitors (e.g., darapladib, Tyrisa®, varespladib, rilapladib), ApoA-1 enhancers (e.g., RVX-208, CER-001, MDCO-216, CSL-112), cholesterol synthesis inhibitors (e.g., ETC-1002), lipid metabolism modulators (e.g., BMS-823778, TAP-301, DRL-21994, DRL-21995) and omega-3 fatty acids and derivatives thereof (e.g., icosapent ethyl (AMR101), Epanova®, AKR-063, NKPL-66, PRC-4016, CAT-2003);
[0152] bromocriptine (e.g., Cycloset©, Parlodel®), phentermine and phentermine formulations or combinations (e.g., Adipex-P, lonamin, Qsymia®), benzphetamine (e.g., Didrex®), diethylpropion (e.g., Tenuate®), phendimetrazin (e.g., Adipost®, Bontril®), bupropion and combinations (e.g., Zyban®, Wellbutrin XL®, Contrave®, Empatic©), sibutramine (e.g., Reductil®, Meridia®), topiramat (e.g., Topamax®), zonisamid (e.g., Zonegran®), tesofensine, opioid antagonists such as naltrexone (e.g., Naltrexin®, naltrexone+bupropion), cannabinoid receptor 1 (CB1) antagonists (e.g., TM-38837), melanin-concentrating hormone (MCH-1) antagonists (e.g., BMS-830216, ALB-127158(a)), MC4 receptor agonists and partial agonists (e.g., AZD-2820, RM-493), neuropeptide Y5 (NPY5) or NPY2 antagonists (e.g., velneperit, S-234462), NPY4 agonists (e.g., PP-1420), beta-3-adrenergic receptor agonists, leptin or leptin mimetics, agonists of the 5-hydroxytryptamine 2c (5HT2c) receptor (e.g., lorcaserin, Belviq®), pramlintide/metreleptin, lipase inhibitors such as cetilistat (e.g., Cametor®), orlistat (e.g., Xenical®, Calobalin®), angiogenesis inhibitors (e.g., ALS-L₁₀₂₃), betahistidin and histamine H3 antagonists (e.g., HPP-404), AgRP (agouti related protein) inhibitors (e.g., TTP-435), serotonin re-uptake inhibitors such as fluoxetine (e.g., Fluctine®), duloxetine (e.g., Cymbalta®), dual or triple monoamine uptake inhibitors (dopamine, norepinephrine and serotonin re-uptake) such as sertraline (e.g., Zoloft®), tesofensine, methionine aminopeptidase 2 (MetAP2) inhibitors (e.g., beloranib), and antisense oligonucleotides against production of fibroblast growth factor receptor 4 (FGFR4) (e.g., ISIS-FGFR4Rx) or prohibitin targeting peptide-1 (e.g., Adipotide®);
[0153] nitric oxide donors, AT1 antagonists or angiotensin II (AT2) receptor antagonists such as telmisartan (e.g., Kinzal®, Micardis®), candesartan (e.g., Atacand®, Blopress®), valsartan (e.g., Diovan®, Co-Diovan®), losartan (e.g., Cosaar®), eprosartan (e.g., Teveten®), irbesartan (e.g., Aprovel®, CoAprovel®), olmesartan (e.g., Votum®, Olmetec©), tasosartan, azilsartan (e.g., Edarbi®), dual angiotensin receptor blockers (dual ARBs), angiotensin converting enzyme (ACE) inhibitors, ACE-2 activators, renin inhibitors, prorenin inhibitors, endothelin converting enzyme (ECE) inhibitors, endothelin receptor (ET1/ETA) blockers, endothelin antagonists, diuretics, aldosterone antagonists, aldosterone synthase inhibitors, alpha-blockers, antagonists of the alpha-2 adrenergic receptor, beta-blockers, mixed alpha-/beta-blockers, calcium antagonists, calcium channel blockers (CCBs), nasal formulations of the calcium channel blocker diltiazem (e.g., CP-404), dual mineralocorticoid/CCBs, centrally acting antihypertensives, inhibitors of neutral endopeptidase, aminopeptidase-A inhibitors, vasopeptide inhibitors, dual vasopeptide inhibitors such as neprilysin-ACE inhibitors or neprilysin-ECE inhibitors, dual-acting AT receptor-neprilysin inhibitors, dual AT1/ETA antagonists, advanced glycation end-product (AGE) breakers, recombinant renalase, blood pressure vaccines such as anti-RAAS (renin-angiotensin-aldosteron-system) vaccines, AT1- or AT2-vaccines, drugs based on hypertension pharmacogenomics such as modulators of genetic polymorphisms with antihypertensive response, thrombocyte aggregation inhibitors, and others or combinations of any of these are suitable.

[0154] In certain exemplary embodiments, a “nucleic acid molecule” is according to the invention deoxyribonucleic acid (DNA) or ribonucleic acid (RNA). A nucleic acid molecule may according to the invention be in the form of a molecule which is single-stranded or double-stranded. A nucleic acid molecule according to the invention may be linear or covalently closed to form a circle.

[0155] The term “DNA”, as used herein, refers to a molecule which comprises deoxyribonucleotide residues and, in certain exemplary embodiments, is entirely or substantially composed of deoxyribonucleotide residues. “Deoxyribonucleotide”, as used herein, refers to a nucleotide, which lacks a hydroxyl group at the 2′-position of a beta-D-ribofuranosyl group. The term “DNA” includes isolated DNA, such as partially or completely purified DNA, essentially pure DNA, synthetic DNA, and recombinantly generated DNA. The term “DNA” also includes modified DNA, which differs from naturally occurring DNA by the addition, deletion, substitution and/or alteration of one or more nucleotides. Such alterations can include the addition of non-nucleotide material, such as to the end(s) of a DNA or internally, for example at one or more nucleotides of the DNA. Nucleotides in DNA molecules can also comprise non-standard nucleotides, such as non-naturally occurring nucleotides or chemically synthesized nucleotides.

[0156] Altered DNA molecules can be referred to as analogues or analogues of naturally-occurring DNA.

[0157] The term “RNA”, as used herein, refers to a molecule, which comprises ribonucleotide residues and is optionally entirely or substantially composed of ribonucleotide residues. “Ribonucleotide”, as used herein, refers to a nucleotide with a hydroxyl group at the 2′-position of a beta-D-ribofuranosyl group. The term “RNA” includes isolated RNA, such as partially or completely purified RNA, essentially pure RNA, synthetic RNA, and recombinantly generated RNA. The term “RNA” also includes modified RNA, which differs from naturally occurring RNA by the addition, deletion, substitution and/or alteration of one or more nucleotides. Such alterations can include the addition of a non-nucleotide material, such as to the end(s) of a RNA or internally, for example at one or more nucleotides of the RNA. Nucleotides in RNA molecules can also comprise non-standard nucleotides, such as non-naturally occurring nucleotides or chemically synthesized nucleotides or deoxynucleotides. Altered RNA molecules can be referred to as analogues or analogues of naturally-occurring RNA. According to the invention, “RNA” refers to single-stranded RNA or double stranded RNA. In one embodiment, the RNA is mRNA, e.g., In Vitro Transcribed RNA (IVT RNA) or synthetic RNA. The RNA may also be modified, e.g., with one or more modifications increasing the stability (e.g., the half-life) of the RNA. Such modifications are known to a person skilled in the art and include, for example, 5′-caps or 5′cap analogues.

[0158] When used in connection with nucleotides, the term “naturally occurring” refers to the bases adenine (A), cytosine (C), guanine (G), thymine (T), and uracil (U).

[0159] A nucleic acid molecule according to the present invention may be contained/comprised in a vector. The term “vector”, as used herein, includes all vectors known to the skilled person, including plasmid vectors, cosmid vectors, phage vectors (e.g., lambda phage), viral vectors (e.g., adenoviral or baculoviral vectors), or artificial chromosome vectors (e.g., Bacterial Artificial Chromosomes (BACs), Yeast Artificial Chromosomes (YACs), or P1 Artificial Chromosomes (PACs)). Said vectors include expression as well as cloning vectors. Expression vectors include plasmids as well as viral vectors and generally contain a desired coding sequence and appropriate DNA sequences necessary for the expression of an operably linked coding sequence in a particular host organism (e.g., a bacterium, a yeast, a plant, an insect, a mammal or the like) or in an in vitro expression system. Cloning vectors are generally used to engineer and amplify a certain desired DNA fragment and may lack functional sequences needed for expression of the desired DNA fragments.

[0160] Alternatively, a nucleic acid molecule according to the present invention may be integrated into a genome, e.g., the genome of a host cell. Means and methods to integrate a particular nucleic acid molecule into a genome are well-known to a person skilled in the art.

[0161] The term “cell” or “host cell”, as used herein, refers to an intact cell, i.e., a cell with an intact membrane that has not released its normal intracellular components such as enzymes, organelles, or genetic material. In certain exemplary embodiments, an intact cell is a viable cell, i.e., a living cell capable of carrying out its normal metabolic functions. In certain exemplary embodiments, a cell or a host cell is any cell which can be transfected or transformed with an exogenous nucleic acid. In certain exemplary embodiments, the cell, when transfected or transformed with an exogenous nucleic acid and transferred to a recipient, can express the nucleic acid in the recipient.

[0162] The term “cell” includes prokaryotic cells, such as bacterial cells, and eukaryotic cells, such as yeast cells, fungal cells or mammalian cells. Suitable bacterial cells include, but are not limited to, cells from gram-negative bacterial strains, such as strains of Escherichia coli, Proteus, and Pseudomonas, and gram-positive bacterial strains, such as strains of Bacillus, Streptomyces, Staphylococcus, and Lactococcus. Suitable fungal cells include, but are not limited to, cells from the species of Trichoderma, Neurospora, and Aspergillus. Suitable yeast cells include, but are not limited to, cells from the species of Saccharomyces (for example, Saccharomyces cerevisiae), Schizosaccharomyces (for example, Schizosaccharomyces pombe), Pichia (for example, Pichia pastoris and Pichia methanolica), and Hansenula. Suitable mammalian cells include, but are not limited to, for example, CHO cells, BHK cells, HeLa cells, COS cells, HEK-293 and the like. In one embodiment, HEK-293 cells are used. However, amphibian cells, insect cells, plant cells, and any other cells used in the art for the expression of heterologous proteins can be used, as well. In certain exemplary embodiments, mammalian cells (e.g., cells from humans, mice, hamsters, pigs, goats, or primates) are used for adoptive transfer.

[0163] Suitable cells may be derived from a large number of tissue types and include primary cells and cell lines, such as cells of the immune system (e.g., antigen-presenting cells such as dendritic cells and T cells, stem cells such as hematopoietic stem cells and mesenchymal stem cells) as well as any other cell types.

[0164] An “antigen-presenting cell”, as used herein, is a cell that displays antigen in the context of major histocompatibility complex on its surface. A T cell may recognize a histocompatibility complex using its T cell receptor (TCR).

[0165] A cell or host cell may be isolated or part of a tissue or organism, in particular a “non-human organism”. The term “non-human organism”, as used herein, is meant to include non-human primates or other animals, e.g., mammals, such as cows, horses, pigs, sheep, goats, dogs, cats, rabbits or rodents (e.g., mice, rats, guinea pigs and hamsters).

[0166] A pharmaceutical composition in accordance with the present invention comprises one or more carriers and/or excipients, all of which are pharmaceutically acceptable. The term “pharmaceutically acceptable”, as used herein, refers to the non-toxicity of a material which, in certain exemplary embodiments, does not interact with the action of the active agent of the pharmaceutical composition.

[0167] The term “carrier”, as used herein, refers to an organic or inorganic component, of a natural or synthetic nature, in which the active component is combined in order to facilitate, enhance or enable application. According to the invention, the term “carrier” also includes one or more compatible solid or liquid fillers, diluents or encapsulating substances, which are suitable for administration to a subject.

[0168] Suitable carrier substances for parenteral administration include, but are not limited to, sterile water, Ringer's solution, Lactated Ringer's solution, physiological saline, bacteriostatic saline (e.g., saline containing 0.9% benzyl alcohol), phosphate-buffered saline (PBS), Hank's solution, polyalkylene glycols, hydrogenated naphthalenes and, in particular, biocompatible lactide polymers, lactide/glycolide copolymers or polyoxyethylene/polyoxy-propylene copolymers.

[0169] The term “excipient”, as used herein, is intended to include all substances which may be present in a pharmaceutical composition and which are not active ingredients, such as salts, binders (e.g., lactose, dextrose, sucrose, trehalose, sorbitol, mannitol), fillers, lubricants, thickeners, surface active agents, preservatives, emulsifiers, buffer substances, flavoring agents, or colorants.

[0170] Salts that are not pharmaceutically acceptable may be used for preparing pharmaceutically acceptable salts and are included in the invention. Pharmaceutically acceptable salts of this kind comprise, in a non-limiting way, those prepared from the following acids: hydrochloric, hydrobromic, sulfuric, nitric, phosphoric, maleic, acetic, salicylic, citric, formic, malonic, succinic, and the like. Pharmaceutically acceptable salts may also be prepared as alkali metal salts or alkaline earth metal salts, such as sodium salts, potassium salts or calcium salts. Salts may be added to adjust the ionic strength or tonicity of a pharmaceutical composition.

[0171] Suitable preservatives for use in a pharmaceutical composition include, but are not limited to, antioxidants, citric acid, sodium citrate, benzalkonium chloride, chlorobutanol, cysteine, methionine, parabens, thimerosal, phenol, cresol, and mixtures thereof.

[0172] Suitable buffer substances for use in a pharmaceutical composition include, but are not limited to, acetic acid in a salt, citric acid in a salt, boric acid in a salt, phosphoric acid in a salt, and tris(hydroxymethyl)aminomethane (Tris, THAM, trometamol).

[0173] In certain exemplary embodiments, a pharmaceutical composition in accordance with the present invention is sterile. Pharmaceutical compositions may be provided in a uniform dosage form and may be prepared in any manner known by those of skill in the art. A pharmaceutical composition may, e.g., be in the form of a solution or suspension.

[0174] A pharmaceutical composition may also be formulated as a stable lyophilized product that is reconstituted with an appropriate diluent, which, optionally, comprises one or more excipients as defined above.

[0175] A pharmaceutical composition in accordance with the present invention may further comprise at least one other active pharmaceutical ingredient in addition to a GLP-1R agonistic peptide.

[0176] As used herein, the term “kit of parts (in short: kit)” refers to an article of manufacture comprising one or more containers and, optionally, a data carrier. Said one or more containers may be filled with one or more of the above mentioned agents of the present invention, e.g., GLP-1R agonistic peptides, fusion proteins, pharmaceutical compositions and related agents, such as nucleic acid molecules and host cells. Additional containers may be included in the kit that contain, e.g., diluents, buffers and further reagents. Said data carrier may be a non-electronical data carrier, e.g., a graphical data carrier such as an information leaflet, an information sheet, a bar code or an access code, or an electronical data carrier such as a compact disk (CD), a digital versatile disk (DVD), a microchip or another semiconductor-based electronical data carrier. The access code may allow the access to a database, e.g., an internet database, a centralized, or a decentralized database. Said data carrier may comprise instructions for the use of the agents of the present invention, e.g., GLP-1R agonistic peptides, fusion molecules pharmaceutical compositions and related agents, such as nucleic acid molecules and host cells, as described herein.

[0177] The agents and compositions described herein may be administered via any conventional route, e.g., orally, pulmonary administration, by inhalation or parenterally, including by injection or infusion. In one embodiment, parenteral administration is used, e.g., intravenously, intraarterially, subcutaneously, intradermally or intramuscularly. The agents and compositions described herein may also be administered through sustained release administration.

[0178] Pharmaceutical compositions suitable for parenteral administration typically comprise a sterile aqueous or non-aqueous preparation of the active compound, which is optionally isotonic to the blood of the recipient. Examples of compatible carriers/solvents/diluents are sterile water, Ringer's solution, Lactated Ringer's solution, physiological saline, bacteriostatic saline (e.g., saline containing 0.9% benzyl alcohol), PBS and Hank's solution. In addition, usually sterile, fixed oils may be used as solution or suspension medium.

[0179] The agents and compositions described herein are usually administered in therapeutically effective amounts. A “therapeutically effective amount” refers to the amount, which achieves a desired therapeutic reaction or a desired therapeutic effect alone or together with further doses, optionally without causing or only minimally causing unacceptable or unwanted side-effects.

[0180] In certain exemplary embodiments, the case of treatment of a particular disease, a particular disorder, or a particular condition, the desired reaction can relate to inhibition of the course of the disease, disorder or condition. This comprises slowing down the progress of the disease, disorder or condition and, in particular, interrupting or reversing the progress of the disease, disorder or condition. The desired reaction in a treatment of a disease, disorder or condition may also be delay of the onset or a prevention of the onset of said disease, disorder or condition. An effective amount of an agent or composition described herein will depend on the condition to be treated, the severeness of the disease, disorder or condition, the individual parameters of the subject, including age, physiological condition, size and weight, the duration of treatment, the type of an accompanying therapy (if present), the specific route of administration and similar factors. Accordingly, the doses administered of the agents described herein may depend on various of such parameters. In the case that a reaction in a subject is insufficient with an initial dose, higher doses (or effectively higher doses achieved by a different, more localized route of administration) may be used.

[0181] According to the invention, the term “disease, disorder or condition” refers to any pathological or unhealthy state, in particular obesity, being overweight, metabolic syndrome, diabetes mellitus, diabetic retinopathy, hyperglycemia, dyslipidemia, NASH and/or atherosclerosis.

[0182] The term “obesity”, as used herein, refers to a medical condition in which excess body fat has accumulated to the extent that it may have a negative effect on health. In terms of a human (adult) subject, obesity can be defined as a body mass index (BMI) greater than or equal to 30 kg/m² (BMI≥30 kg/m²).

[0183] The phrase “being overweight”, as used herein, refers to a medical condition in which the amount of body fat is higher than is optimally healthy. In terms of a human (adult) subject, obesity can be defined as a body mass index (BMI) greater than or equal to 25 kg/m² (e.g., 25 kg/m²≤BMI<30 kg/m²).

[0184] The BMI is a simple index of weight-for-height that is commonly used to classify overweight and obesity in adults. It is defined as a person's weight in kilograms divided by the square of his/her height in meters (kg/m²).

[0185] “Metabolic syndrome”, as used herein, refers to a clustering of at least three of the following medical conditions: abdominal (central) obesity (e.g., defined as waist circumference≥94 cm for Europid men and ≥80 cm for Europid women, with ethnicity specific values for other groups), elevated blood pressure (e.g., 130/85 mmHg or higher), elevated fasting plasma glucose (e.g., at least 100 mg/dL), high serum triglycerides (e.g., at least 150 mg/dL), and low high-density lipoprotein (HDL) levels (e.g., less than 40 mg/dL for males and less than 50 mg/dL for females).

[0186] “Diabetes mellitus” (also simply referred to as “diabetes”), as used herein, refers to a group of metabolic diseases characterized by high levels of blood glucose resulting from defects in insulin production, insulin action, or both. In one embodiment, diabetes mellitus is selected from the group consisting of type 1 diabetes mellitus, type 2 diabetes mellitus, gestational diabetes mellitus, Late onset Autoimmune Diabetes in the Adult (LADA), Maturity Onset Diabetes of the Young (MODY) and other types of diabetes resulting from specific genetic conditions, drugs, malnutrition, infections and other illnesses. The current WHO diagnostic criteria for diabetes mellitus are as follows: fasting plasma glucose≥7.0 mmol/I (126 mg/dL) or 2-hour plasma glucose≥11.1 mmol/I (200 mg/dL).

[0187] “Type 1 diabetes mellitus” (also known as “Insulin-Dependent Diabetes Mellitus (IDDM)” or “juvenile diabetes”), as used herein, is a condition characterized by high blood glucose levels caused by total lack of insulin. This occurs when the body's immune system attacks the insulin producing beta cells in the pancreas and destroys them. The pancreas then produces little or no insulin. Pancreatic removal or disease may also lead to loss of insulin-producing beta cells. Type 1 diabetes mellitus accounts for between 5% and 10% of cases of diabetes.

[0188] “Type 2 diabetes mellitus” (also known as “Non-Insulin-Dependent Diabetes (NIDDM)” or “adult-onset diabetes”), as used herein, is a condition characterized by excess glucose production in spite of the availability of insulin, and circulating glucose levels remain excessively high as a result of inadequate glucose clearance (insulin action). Type 2 diabetes mellitus may account for about 90% to 95% of all diagnosed cases of diabetes.

[0189] “Gestational diabetes”, as used herein, is a condition in which women without previously diagnosed diabetes exhibit high blood glucose levels during pregnancy (especially during the third trimester). Gestational diabetes affects 3-10% of pregnancies, depending on the population studied.

[0190] “Late onset Autoimmune Diabetes in the Adult (LADA)” (also referred to as “slow onset type 1 diabetes”), as used herein, is a form of type 1 diabetes mellitus that occurs in adults, often with a slower course of onset.

[0191] “Maturity Onset Diabetes of the Young (MODY)”, as used herein, refers to a hereditary form of diabetes caused by mutations in an autosomal dominant gene disrupting insulin production.

[0192] “Diabetic retinopathy”, as used herein, is an ocular disease induced by the metabolic disarrangements occurring in diabetic patients and leads to progressive loss of vision.

[0193] The term “hyperglycemia”, as used herein, refers to an excess of sugar (glucose) in the blood.

[0194] The term “dyslipidemia”, as used herein, refers to a disorder of lipoprotein metabolism, including lipoprotein overproduction (“hyperlipidemia”) or deficiency (“hypolipidemia”). Dyslipidemias may be manifested by elevation of the total cholesterol, low-density lipoprotein (LDL) cholesterol and/or triglyceride concentrations, and/or a decrease in high-density lipoprotein (HDL) cholesterol concentration in the blood.

[0195] Non-Alcoholic SteatoHepatitis (NASH), as used herein, refers to a liver disease characterized by an accumulation of fat (lipid droplets), along with inflammation and degeneration of hepatocytes. Once initiated, the disease is accompanied with a high risk of cirrhosis, a state wherein liver functions are altered that can progress to liver insufficiency. Thereafter, NASH often progresses to liver cancer.

[0196] “Atherosclerosis”, as used herein, refers to a vascular disease characterized by irregularly distributed lipid deposits called plaque in the intima of large and medium-sized arteries that may cause narrowing of arterial lumens and proceed to fibrosis and calcification. Lesions are usually focal and progress slowly and intermittently. Occasionally, plaque rupture occurs leading to obstruction of blood flow resulting in tissue death distal to the obstruction. Limitation of blood flow accounts for most clinical manifestations, which vary with the distribution and severity of the obstruction.

[0197] The term “medicament”, as used herein, refers to a substance and/or composition used in therapy, i.e., in the treatment of a disease or disorder.

[0198] The term “treat”, as used herein, refers to the administration of a compound or composition or a combination of compounds or compositions to a subject in order to: prevent, ameliorate, or eliminate a disease, disorder or condition in a subject; arrest or slow disease, disorder or condition in a subject; inhibit or slow the development of a new disease, disorder or condition in a subject; decrease the frequency or severity of symptoms and/or recurrences in a subject who currently has or who previously has had a disease, disorder or condition; and/or prolong, i.e., increase, the lifespan of a subject.

[0199] In particular, the phrases “treating a disease, disorder or condition” and “treatment of a disease, disorder or condition” include curing, shortening the duration of, ameliorating, preventing, slowing down or inhibiting progression or worsening, or preventing or delaying the onset of a disease, disorder or condition or the symptoms thereof.

[0200] The term “subject”, according to the invention, refers to a subject for treatment, in particular a diseased subject (also referred to as “patient”), including, but not limited to, a human being, a non-human primates, or other animals, e.g., mammals, such as cows, horses, pigs, sheep, goats, dogs, cats, rabbits or rodents (e.g., mice, rats, guinea pigs or hamsters). In one embodiment, the subject/patient is a human being.

[0201] The present invention is now further described by reference to the following Examples, which are intended to illustrate, and not to limit, the scope of the present invention.

### EXAMPLES

### Example 1: Determining the Optimal GLP-1RA/FGF21 Activity Ratio by Systems Pharmacology Modelling

[0202] Improved mechanistic insights into pharmacological effects of GLP-1RA/FGF21 fusion proteins in humans were used to identify optimal GLP-1RA/FGF21 potency ratio. A mechanistic systems pharmacology model was developed describing effects of GLP-1 and FGF21 on glucose, lipid, and energy metabolism in humans (Cuevas-Ramos et al. (2009) Curr Diabetes Rev 5(4): 216-220; Deacon et al. (2011) Rev Diabet Stud 8(3): 293-306; Kim et al. (2008) Pharmacol Rev 60(4): 470-512; Kharitonenkov et al. (2014) Mol Metab 3(3): 221-229).

[0203] The model represented relevant pathways for GLP-1 and FGF21 effects. Glycemic control (i.e., HbA1c, fasting plasma glucose, postprandial glucose), lipid parameters (i.e., plasma triglycerides, fatty acids, cholesterol), and energy balance (i.e., body weight, food intake, energy expenditure) were captured to assess therapeutic response to simulated drug treatment (e.g., GLP-1RA/FGF21 fusion protein, Liraglutide, FGF21 analog LY2405319). For LY2405319, see Kharitonenkov et al. (2013) PLoS ONE 8(3): e58575.

[0204] The model covered key aspects of glucose homeostasis controlled by the hormones insulin, glucagon, and certain incretins (e.g., GLP-1, GIP). The major model endpoint regarding glycemic control was HbA1c. HbA1c is a common clinical endpoint used to estimate average plasma glucose concentrations over the previous several months. HbA1c was estimated within the model using the linear correlation between mean plasma glucose and HbA1c as reported by Nathan et al. (2008) Diabetes Care 31(8): 1473-1478.

[0205] The model incorporated triglyceride and fatty acid metabolism at a level appropriate to handle basic lipid metabolism, including the representation of cholesterol. HDL and non-HDL, i.e., LDL plus VLDL cholesterol, are the circulating lipoproteins. The representation of lipid metabolism allowed simulating the impact of FGF21 compounds on lipids and the interaction with statins.

[0206] FGF21 compounds had significant effects on lipid concentrations (Gaich et al. (2013) Cell Metab 18(3): 333-340; Fisher et al. (2011) Endocrinology 152(8): 2996-3004).

[0207] Weight loss or gain in the model was measured as changes in body adipose mass. There was a direct relationship between fat mass and body weight (Broyles et al. (2011) Br J Nutr 105(8): 1272-1276). Food intake was based on basal and resting metabolic rate (Amirkalali et al. (2008) Indian J Med Sci 62(7): 283-290). Body adipose mass stayed constant when energy expenditure equaled caloric intake. Therapy effects on food intake were implemented in the model using the formulation of Gobel et al. (2014) (Obesity (Silver Spring) 22(10): 2105-2108).

[0208] Food was considered to be carbohydrate (glucose equivalents), fat (fatty acid equivalents), and protein (amino acid equivalents). All nutrients entered the stomach, passed through a delay node and then entered a three-compartment gastrointestinal tract. The gastrointestinal tract design was based on work done by Bastianelli et al. (1996) (J Anim Sci 74(8): 1873-1887) and Worthington (1997) (Med Inform (Lond) 22(1): 35-45) regarding food digestion and absorption.

[0209] Nutrients, hormones, drugs, and disease conditions can cause delays in gastric emptying. Under healthy conditions, the gastric emptying rate depends on the size of the meal, its energy density, and the amount of nutrients in the stomach (Achour et al. (2001) Eur J Clin Nutr 55(9): 769-772; Fouillet et al. (2009) Am J Physiol Regul Integr Comp Physiol 297(6): R1691-1705). Individuals with diabetes often have a delay in glucose absorption observed with an oral glucose tolerance test or a meal test (Bharucha et al. (2009) Clin Endocrinol (Oxf) 70(3): 415-420; Chang et al. (2012) Diabetes Care 35(12): 2594-2596). This delay is attributed to a slowing of gastric emptying. A delay in travel between the stomach and small intestine was added in the model of this example to account for delayed gastric emptying in diabetic subjects. Drugs and hormones (e.g., GLP-1) can affect the vagal tone of the stomach, which reduces mechanical mixing and/or peristalsis, and also slows gastric emptying (Jelsing et al. (2012) Diabetes Obes Metab 14(6): 531-538; Little et al. (2006) J Clin Endocrinol Metab 91(5): 1916-1923; Nauck et al. (2011) Diabetes 60(5): 1561-1565; van Can et al. (2013) Int J Obes (Lond) 38(6): 784-93).

[0210] One aim of this investigation was preventing GLP-1 related adverse effects, i.e., nausea and vomiting (Lean et al. (2014) Int J Obes (Lond) 38(5): 689-697). Gastric emptying measures provided an estimate of adverse events such as nausea and vomiting that correlated with low rates of gastric emptying. Hence, a marker for gastric adverse events in the model was the sum of gastric emptying rate.

[0211] Different virtual patients were implemented in a model platform representing healthy and type 2 diabetic patients at different stages of the disease. Moreover, the virtual patients covered different degrees of obesity and dyslipidemia. The virtual patients represented variability in disease severity and pathophysiology and phenotypic variability observed in the clinic.

[0212] Several therapies were implemented in the model, i.e., GLP-1RA/FGF21 fusion protein, Liraglutide, FGF21 analog LY2405319, Metformin, Atorvastatin, Sitagliptin, and human insulin. These therapies could be switched on or off in the simulations. The virtual patient was assumed to be on a background of Metformin and Atorvastatin when administered the GLP-1RA/FGF21 fusion protein.

[0213] Virtual GLP-1RA/FGF21 fusion proteins were implemented in the model described in this example. The fusion protein contained both FGF21 and GLP-1 agonistic activities, and it had the same effects as both FGF21 and GLP-1 receptor agonists. The pharmacokinetic profiles of the virtual fusion proteins were assumed to be similar to Dulaglutide (Geiser et al. (2016) Clin Pharmacokinet 55(5): 625-34).

[0214] The model was validated by comparison with numerous data sets. The simulation results were qualitatively consistent with relevant data and knowledge, e.g., Hellerstein et al. (1997) J Clin Invest 100(5): 1305-1319; Muscelli et al. (2008) Diabetes 57(5): 1340-1348. The model matched relevant quantitative test data, e.g., Aschner et al. (2006) Diabetes Care 29(12): 2632-2637; Dalla Man, Caumo et al. (2005) Am J Physiol Endocrinol Metab 289(5): E909-914; Dalla Man et al. (2005) Diabetes 54(11): 3265-3273; Fiallo-Scharer (2005) J Clin Endocrinol Metab 90(6): 3387-3391; Hahn et al. (2011) Theor Biol Med Model 8: 12; Herman et al. (2005) Clin Pharmacol Ther 78(6): 675-688; Herman et al. (2006) J Clin Pharmacol 46(8): 876-886 and J Clin Endocrinol Metab 91(11): 4612-4619; Hojlund et al. (2001) Am J Physiol Endocrinol Metab 280(1): E50-58; Monauni et al. (2000) Diabetes 49(6): 926-935; Nauck et al. (2009) Diabetes Care 32(1): 84-90; Nauck et al. (1993) J Clin Invest 91(1): 301-307; Nauck et al. (2004) Regul Pept 122(3): 209-217; Tzamaloukas et al. (1989) West J Med 150(4): 415-419; Sikaris (2009) J Diabetes Sci Technol 3(3): 429-438; Vicini and Cobelli (2001) Am J Physiol Endocrinol Metab 280(1): E179-186; Vollmer et al. (2008) Diabetes 57(3): 678-687.

[0215] Existing therapies were implemented in the model for direct comparison, including FGF21 analog and a GLP-1 receptor agonist. The FGF21 analog's effects were validated with clinical data, e.g., Gaich et al. (2013) Cell Metab 18(3): 333-340. The GLP-1 receptor agonist Liraglutide was a direct competitor for the target, and its implementation was compared with various clinical data, e.g., data described in Jacobsen et al. (2009) Br J Clin Pharmacol 68(6): 898-905; Elbrond et al. (2002) Diabetes Care 25(8): 1398-1404; Chang et al. (2003) Diabetes 52(7): 1786-1791; Kolterman et al. (2003) J Clin Endocrinol Metab 88(7): 3082-3089; Degn et al. (2004) Diabetes 53(5): 1187-1194; Kolterman et al. (2005) Am J Health Syst Pharm 62(2): 173-181; Vilsboll et al. (2008) Diabet Med 25(2): 152-156; Buse et al. (2009) Lancet 374(9683): 39-47; Jelsing et al. (2012) Diabetes Obes Metab 14(6): 531-538; Hermansen et al. (2013) Diabetes Obes Metab 15(11): 1040-1048; Suzuki et al. (2013) Intern Med 52(10): 1029-1034; van Can et al. (2013) Int J Obes (Lond) 38(6): 784-93); Zinman et al. (2009) Diabetes Care 32(7): 1224-1230; Russell-Jones et al. (2009) Diabetologia 52(10): 2046-2055; Pratley et al. (2011) Int J Clin Pract 65(4): 397-407; Nauck et al. (2013) Diabetes Obes Metab 15(3): 204-212; Flint et al. (2011) Adv Ther 28(3): 213-226; Kapitza et al. (2011) Adv Ther 28(8): 650-660; and Astrup et al. (2012) Int J Obes (Lond) 36(6): 843-854.

[0216] The model platform allowed simulation of beneficial and adverse effects of virtual GLP-1 RA/FGF21 fusion proteins with varying activity ratios. Effective FGF21-mediated EC50 values were set constant to those derived from Gaich et al. (2013) Cell Metab 18(3): 333-340. Effective GLP-1-mediated EC50 values were reduced by a factor of 2 to 600 in increments of 1 relative to endogenous GLP-1 (Table 1).

TABLE 1
GLP-1R agonist/FGF21 fusion protein pharmacodynamics (EC50 values).

| | | | | | Effective |
|---|---|---|---|---|---|
| | Effective GLP-1-Mediated EC50 Values | | | | FGF21- |
| | Peripheral | | | | Mediated |
| Potency | Glucose | Insulin | Gastric | Food | EC50 |
| Ratio* | Uptake | Release | Emptying | Intake | Values** |
| 1 | 35 pM | 20 pM | 50 pM | 80 pM | 3547 pM |
| 100 | 3500 pM | 2000 pM | 5000 pM | 8000 pM | 3547 pM |

*Relative to endogenous GLP-1
**FGF21 EC50 values were set assuming half maximal effect per Gaich et al. (2013) Cell Metab 18(3): 333-340

[0217] For each virtual fusion protein, the exposure-response relation was simulated for relevant pharmacodynamic endpoints, i.e., HbA1c, triglycerides, fatty acids, non-HDL cholesterol, and adipose mass. As a marker for GLP-1-mediated adverse events, gastric emptying rate was used. 52 weeks treatment of an average obese dyslipidemic type 2 diabetic virtual patient with GLP-1RA/FGF21 fusion proteins was simulated for a broad dose range. After treatment for 52 weeks, all relevant pharmacodynamic endpoints were expected to reach steady state. For each endpoint the half maximal effective concentration (EC50 value) was determined from the exposure-response curves. The EC50 values varied with the activity ratio, especially for the mainly GLP-1-mediated endpoints HbA1c and gastric emptying rate. FIG. 1 depicts the EC50 values depending on the GLP-1 attenuation factor. An increased GLP-1 attenuation factor indicated a reduction in GLP-1R agonistic activity.

[0218] This procedure allowed the identification of relevant activity ratios, for which adverse effects were observed at higher plasma levels as compared to the plasma levels that mediated pharmacodynamics effects. For GLP-1 attenuation factors greater than 9, the EC50 of GLP-1-mediated gastrointestinal adverse effects was greater than the EC50 of pharmacodynamic effects. Hence, gastric adverse effects occurred at higher plasma levels than levels needed to achieve pharmacodynamic effects. It was possible to elucidate doses that provided all desirable pharmacodynamic effects while avoiding GLP-1-mediated gastrointestinal adverse effects.

[0219] The maximal EC50 value for gastric emptying rate was reached at attenuation factor 531. The maximal distance between adverse and mean pharmacodynamics effects was reached at attenuation factor 482 (FIG. 2). Therefore, activity ratios beyond 1:482 were not relevant. The maximal distance between maximum of pharmacodynamics (HbA1c) and adverse effects was 319. The maximal distance between maximum of pharmacodynamics (HbA1c) and adverse effects normalized by spreading of FGF21- (lipids) and GLP-1-mediated effects (HbA1c) was 121.

[0220] GLP-1RA/FGF21 fusion proteins with potency ratios between 1:10 and 1:482 were predicted to be most beneficial in improving lipid profile, body weight, and glucose metabolism and likely caused no significant adverse events based on gastric emptying response. Lower potency ratios were likely not good candidates based on their predicted strong inhibition of gastric emptying and potential for adverse events. Higher potency ratios were thought likely to be not sufficiently effective and therefore not competitive.

[0221] 12 weeks of treatment of an average obese dyslipidemic type 2 diabetic virtual patient with GLP-1RA/FGF21 fusion proteins was simulated for a broad dose range, since the primarily GLP-1-mediated parameter of HbA1c levels clinically reaches steady state after 12 weeks of treatment with GLP-1 receptor agonists and FGF21 agents known in the art.

[0222] FIG. 3 depicts the EC50 values obtained versus GLP-1 attenuation factor over a 12 weeks simulation period. For GLP-1 attenuation factors greater than 18, the EC50 of GLP-1-mediated gastrointestinal adverse effect was greater than EC50 of pharmacodynamic effects. The maximal EC50 value for gastric emptying rate was reached at attenuation factor 501. The maximal distance between adverse and mean pharmacodynamics effects was reached at attenuation factor 469 (FIG. 4). The maximal distance between maximum of pharmacodynamics (HbA1c) and adverse effects was 313. The maximal distance between maximum of pharmacodynamics (HbA1c) and adverse effects normalized by spreading of FGF21- (lipids) and GLP-1-mediated effects (HbA1c) was 123.

[0223] Efficacy and potential for adverse events for GLP-1 RA/FGF21 fusion proteins with different activity ratios were investigated by means of the described systems pharmacology approach. Fusion proteins with presumably calculated ideal potency ratios were identified, predicted to be beneficial in improving lipid profile, body weight, and glycemic control while likely not causing significant adverse GLP-1 RA associated effects based on gastric emptying response. Compounds with the selected model-informed potency ratios were predicted to provide a good efficacy versus risk profile.

### Example 2: Expression of Homodimeric GLP-1RA/FGF21 Fusion Proteins in HEK-293, CHO and E. coli Cells and Chemical Synthesis of Isolated GLP-1R Agonistic Peptides

[0224] GLP-1RA/FGF21 Fc fusion proteins were produced by transient transfection in HEK-293 or CHO cells. DNA sequences of the fusion proteins were N-terminally fused to an IL2 signal sequence (SEQ ID NO: 246) followed by a histidine-rich sequence (His-tag) and a TEV protease-cleavage site (SEQ ID NO: 247 or 248). The signal sequence was required for secretion of the desired proteins into the culture medium. The proteins were purified from the culture supernatant using immobilized metal-ion affinity chromatography (IMAC) (cOmplete His-Tag Purification Column™, Roche). After elution from the IMAC-column, the N-terminal His-tag was optionally cleaved by the addition of Tobacco Etch Virus (TEV) protease. After His-tag cleavage, the cleavage reaction solution was passed a second time over an IMAC-column (cOmplete His-Tag Purification Column™, Roche), collecting the (His-tag-free) flow-through fraction. The protein was further purified using Protein A affinity chromatography (rProtein A Sepharose, GE Healthcare) and a gel filtration column with phosphate buffered saline (PBS, Gibco) as running buffer. Fractions containing the desired proteins were collected, pooled, concentrated and stored at −80° C. until further usage.

[0225] The FGF21 protein of SEQ ID NO: 252 (mature human wild-type FGF21 with an additional N-terminal Gly; referred to as G-FGF21 herein) was expressed in E. coli. The DNA sequence of the FGF21 protein was N-terminally fused to a Histidine-rich sequence (His-tag) and a TEV or SUMO protease-cleavage site (SEQ ID NO: 248 or 249). The desired protein was purified using immobilized metal-ion affinity chromatography (IMAC) (HisTrap HP, GE Healthcare) followed by cleavage of the N-terminal His-tag by addition of TEV or SUMO protease. After His-tag cleavage, the cleavage reaction solution was purified using an ion exchange column (Source 15, GE Healthcare), followed by a gel filtration column (Superdex 75, GE Healthcare) using phosphate buffered saline (PBS, Gibco) as running buffer. Fractions containing the desired protein were collected, pooled, concentrated and stored at −80° C. until further usage.

[0226] In an alternative approach, fusion proteins were produced by expression in E. coli inclusion bodies followed by a refolding step in which folded fusion protein was obtained by unfolding the inclusion bodies in Tris-buffered guanidinium chloride solution and refolding by dilution in buffer without chaotrophic salt. Fusion proteins were purified using Protein A affinity chromatography (MabSelect SuRe, GE Healthcare) followed by cleavage of the N-terminal pre-sequence by addition of TEV protease. The cleavage reaction solution was purified using an anion exchange column (POROS 50 HQ, ThermoFisher). Fractions containing the desired proteins were collected and pooled. Final buffer conditions and protein concentration were established by an ultrafiltration/diafiltration step using PBS (Gibco). Samples were stored at −80° C. until further usage.

[0227] Whereas fusion proteins were produced by recombinant methods (see above), isolated peptidic GLP-1R agonists were chemically synthesized.

[0228] More particularly, peptides were synthesized using the following manual synthesis procedure:

[0229] 0.3 g Desiccated Rink amide MBHA Resin (0.66 mmol/g) was placed in a polyethylene vessel equipped with a polypropylene filter. Resin was swollen in DCM (15 ml) for 1 hour and DMF (15 mL) for one hour. The Fmoc group on the resin was de-protected by treating it twice with 20% (v/v) piperidine/DMF solution for 5 and 15 minutes. The resin was washed with DMF/DCM/DMF (6:6:6 times each). A Kaiser test (quantitative method) was used for the conformation of removal of Fmoc from solid support. The C-terminal Fmoc-amino acid (5 equivalent excess corresponding to resin loading) in dry DMF was added to the de-protected resin and coupling of the next Fmoc-amino acid was initiated with 5 equivalent excess of DIC and HOBT in DMF. The concentration of each reactant in the reaction mixture was approximately 0.4 M. The mixture was rotated on a rotor at room temperature for 2 hours. Resin was filtered and washed with DMF/DCM/DMF (6:6:6 times each). Kaiser tests performed on peptide resin aliquots upon completion of coupling was negative (no color on the resin). After the first amino acid attachment, the unreacted amino group, if any, in the resin was capped used acetic anhydride/pyridine/DCM (1:8:8) for 20 minutes to avoid any deletion of the sequence. After capping, resin was washed with DCM/DMF/DCM/DMF (6/6/6/6 time each). The Fmoc group on the C-terminal amino acid attached peptidyl resin was deprotected by treating it twice with 20% (v/v) piperidine/DMF solution for 5 and 15 minutes. The resin was washed with DMF/DCM/DMF (6:6:6 times each). The Kaiser tests performed on peptide resin aliquots upon completion of Fmoc-deprotection were positive.

[0230] The remaining amino acids in target sequence on Rink amide MBHA Resin were sequentially coupled using Fmoc AA/DIC/HOBt method using 5 equivalent excess corresponding to resin loading in DMF. The concentration of each reactant in the reaction mixture was approximately 0.4 M. The mixture was rotated on a rotor at room temperature for 2 hours. Resin was filtered and washed with DMF/DCM/DMF (6:6:6 times each). After each coupling step and Fmoc deprotection step, a Kaiser test was carried out to confirm the completeness of the reaction.

[0231] After the completion of the linear sequence, the ε-amino group of lysine was used as a branching point or a modification point and was deprotected by using 2.5% hydrazine hydrate in DMF for 15 minutes two times and washed with DMF/DCM/DMF (6:6:6 time each). The γ-carboxyl end of glutamic acid was attached to the ε-amino group of Lys using Fmoc-Glu(OH)-OtBu with DIC/HOBt method (using 5 equivalent excess with respect to resin loading) in DMF. The mixture was rotated on a rotor at room temperature for 2 hours. The resin was filtered and washed with DMF/DCM/DMF (6×30 mL each). The Fmoc group on the glutamic acid was de-protected by treating it twice with 20% (v/v) piperidine/DMF solution for 5 and 15 minutes (25 mL each). The resin was washed with DMF/DCM/DMF (6:6:6 times each). A Kaiser test on peptide resin aliquot upon completion of Fmoc-deprotection was positive.

[0232] If the side-chain branching also contained one more γ-glutamic acid, a second Fmoc-Glu(OH)-OtBu was used for the attachment to the free amino group of γ-glutamic acid using the DIC/HOBt method (with a 5 equivalent excess with respect to resin loading) in DMF. The mixture was rotated on a rotor at room temperature for 2 hours. Resin was filtered and washed with DMF/DCM/DMF (6×30 mL each). The Fmoc group on the γ-glutamic acid was de-protected by treating it twice with 20% (v/v) piperidine/DMF solution for 5 and 15 minutes (25 mL). The resin was washed with DMF/DCM/DMF (6:6:6 times each). A Kaiser tests performed on peptide resin aliquots upon completion of Fmoc-deprotection were positive.

[0233] Final cleavage of peptide from the resin:

[0234] The peptidyl resin synthesized by manual synthesis was washed with DCM (6×10 mL), MeOH (6×10 mL) and ether (6×10 mL) and dried in vacuum desiccators overnight. Cleavage of the peptide from the solid support was achieved by treating the peptide-resin with a reagent cocktail (80% TFA/5% thioanisole/5% phenol/2.5% EDT/2.5% DMS/5% DCM) at room temperature for 3 hours. Cleavage mixtures were collected by filtration and the resins were washed with TFA (2 mL) and DCM (2×5 mL). The excess TFA and DCM was concentrated to small volume under nitrogen and a small amount of DCM (5-10 mL) was added to the residue and evaporated under nitrogen. The process was repeated 3-4 times to remove most of the volatile impurities. The residue was cooled to 0° C. and anhydrous ether was added to precipitate the peptide. The precipitated peptide was centrifuged and the supernatant ether was removed and fresh ether was added to the peptide and re-centrifuged. The crude sample was preparative HPLC purified and lyophilized. The identity of peptides were confirmed by LCMS.

### Example 3: In Vitro Cellular Assay for Human FGF21 Receptor Efficacy in CHO Cells (in-Cell Western)

[0235] The cellular in vitro efficacy of G-FGF21 (SEQ ID NO: 252) and fusion proteins of the invention were measured using a specific and highly sensitive In-Cell Western (ICW) assay. The ICW assay is an immunocytochemical assay that is usually performed using a microplate format. CHO Flp-In cells (Invitrogen, Darmstadt, Germany) stably expressing the human FGFR1c together with human beta-Klotho (KLB) were used for an FGF21 receptor autophosphorylation ICW assay (Aguilar et al. (2010) PLoS ONE 5(4): e9965). In order to determine the receptor autophosphorylation level or downstream activation of the MAP kinase ERK1/2, 2×10⁴ cells/well were seeded into 96-well plates and grown for 48 h. Cells were serum starved with serum-free medium Ham's F-12 Nutrient Mix with GlutaMAX (Gibco, Darmstadt, Germany) for 3-4 hours. The cells were subsequently treated with increasing concentrations of either G-FGF21 (SEQ ID NO: 252) or the indicated fusion protein for 5 minutes at 37° C. After incubation, the medium was discarded, and the cells were fixed in 3.7% freshly prepared para-formaldehyde for 20 minutes. Cells were permeabilized with 0.1% Triton-X-100 in PBS for 20 minutes. Blocking was performed with Odyssey blocking buffer (LICOR, Bad Homburg, Germany) for 2 hours at room temperature. As primary antibody, anti-pFGFR Tyr653/654 (New England Biolabs, Frankfurt, Germany) or anti-pERK Phospho-p44/42 MAP Kinase Thr202/Tyr204 (Cell Signaling) was added and incubated overnight at 4° C. After incubation of the primary antibody, cells were washed with PBS plus 0.1% Tween20. The cells were then incubated with secondary anti-Mouse 800CW antibody (LICOR, Bad Homburg, Germany) for 1 hour at room temperature. Subsequently, the cells were washed again with PBS plus 0.1% Tween20. Infrared dye signals were quantified with an Odyssey imager (LICOR, Bad Homburg, Germany). Results were normalized by quantification of DNA with TO-PRO3 dye (Invitrogen, Karlsruhe, Germany). Data were obtained as arbitrary units (AU), and EC50 values were obtained from dose-response curves (summarized in Tables 2 and 3). FIG. 5 shows the results from an ICW with CHO cells overexpressing human FGFR1c plus KLB.

TABLE 2
EC50 values of G-FGF21 (SEQ ID NO: 252) and GLP-1RA/FGF21
Fc fusion proteins measured via ICW pFGFR in CHO cells.

| | pFGFR ICW |
|---|---|
| SEQ ID NO | EC50 (nmol/L) |
| 252 | 4.49 |
| 1 | 38.61 |
| 2 | 30.57 |
| 3 | 22.72 |
| 4 | 36.35 |
| 5 | 20.38 |
| 6 | 19.73 |
| 7 | 27.85 |
| 8 | 25.39 |
| 19 | 34.31 |
| 20 | 42.86 |
| 23 | 54.56 |
| 24 | 25.29 |
| 39 | 13.85 |
| 44 | 29.99 |
| 57 | 25.83 |
| 71 | 13.57 |
| 83 | 16.60 |
| 209 | 66.29 |

TABLE 3
EC50 values of G-FGF21 (SEQ ID NO: 252) and GLP-1RA/FGF21
Fc fusion proteins measured via ICW pERK in CHO cells.

| | pERK ICW |
|---|---|
| SEQ ID NO | EC50 (nmol/L) |
| 252 | 0.17 |
| 1 | 6.72 |
| 2 | 6.94 |
| 3 | 6.07 |
| 4 | 8.61 |
| 5 | 6.84 |
| 6 | 9.86 |
| 7 | 5.96 |
| 8 | 6.75 |
| 19 | 43.75 |
| 20 | 10.40 |
| 23 | 8.60 |
| 24 | 8.39 |
| 39 | 4.28 |
| 44 | 5.40 |
| 57 | 6.86 |
| 71 | 6.19 |
| 83 | 2.44 |
| 209 | 27.93 |

### Example 4: In Vitro Cellular Assay for Human Glucagon-Like-Peptide 1 (GLP-1) Receptor Efficacy

[0236] Agonism of compounds for human glucagon-like peptide-1 (GLP-1) receptor was determined by functional assays measuring the cAMP responses in a HEK-293 cell line stably expressing human GLP-1 receptor.

[0237] Recombinant HEK-293 cells were grown in T175 culture flasks placed at 37° C. to near confluence in medium (DMEM with 10% FBS) and collected in 2 mL vials in cell culture medium containing 10% DMSO in concentrations of 1-5×10⁷ cells/mL. Each vial contained 1.8 mL cell suspension. The vials were slowly frozen to −80° C. in an isopropanol chamber, and then transferred to liquid nitrogen for long term storage.

[0238] Prior to their use, frozen cells were thawed quickly at 37° C., washed with 20 mL cell buffer (1×HBSS; 20 mM HEPES, 0.1% BSA) and centrifuged for 5 minutes at 900 rpm. Cells were resuspended in assay buffer (cell buffer plus 2 mM IBMX) and adjusted to a cell density of 1×10⁶ cells/mL. For measurement, 5 μL cell suspension (final 5×10³ cells/well) and 5 μL of test compound were added to a well of a 384-well plate, followed by incubation for 30 minutes at room temperature. Human GLP-1(7-36) amide from Bachem (Bubendorf, Switzerland, H-6795) (SEQ ID NO: 260) was taken as a control. The cAMP content of cells was determined using a kit from Cisbio Corp. (cat. no. 62AM4PEC) based on Homogenous Time Resolved Fluorescence (HTRF). After addition of HTRF reagents diluted in lysis buffer (kit components), the plates were incubated for 1 h, followed by measurement of the fluorescence ratio at 665/620 nm. The li vitro potencies of agonists were quantified by determining the concentrations that caused 50% activation of maximal response (EC50).

[0239] The results are summarized in Table 4, and dose-response curves are shown in FIG. 6.

TABLE 4
EC50 values of human GLP-1(7-36) (SEQ ID NO: 260), GLP-1RA/
FGF21 Fc fusion proteins and several single GLP-1R agonistic
peptides measured via HTRF cAMP assay in HEK-293 cells.

| | HTRF cAMP EC50 (pmol/L) | | |
|---|---|---|---|
| | Human | Mouse | Monkey |
| SEQ ID NO | GLP-1R | GLP-1R | GLP-1R |
| 260 | 0.77 | 0.62 | 1.12 |
| 1 | 218.76 | 2.80 | 161.07 |
| 2 | 193.72 | 2.93 | 164.36 |
| 3 | 211.94 | 97.21 | 278.82 |
| 4 | 313.33 | 5.29 | 261.98 |
| 5 | 125.01 | 96.46 | 195.69 |
| 6 | 383.35 | 6.45 | 347.21 |
| 7 | 130.91 | 68.11 | 190.20 |
| 8 | 152.24 | 77.14 | 217.09 |
| 18 | 9.90 | 2.09 | 10.18 |
| 19 | 11.20 | 2.16 | 10.95 |
| 20 | 9.49 | 1.97 | 9.86 |
| 21 | 93.80 | 4.19 | 78.68 |
| 22 | 85.58 | 3.88 | 73.93 |
| 23 | 78.72 | 3.32 | 70.72 |
| 24 | 48.83 | 2.66 | 43.54 |
| 25 | 45.94 | 101.49 | 81.30 |
| 26 | 40.08 | 95.33 | 73.30 |
| 27 | 37.53 | 90.96 | 75.10 |
| 28 | 32.85 | 106.99 | 68.70 |
| 29 | 37.67 | 113.45 | 64.00 |
| 30 | 41.96 | 125.49 | 73.30 |
| 31 | 32.31 | 113.47 | 62.80 |
| 39 | 8.50 | 1.16 | 12.30 |
| 40 | 46.06 | 39.02 | 50.40 |
| 42 | 18.07 | 43.21 | 22.20 |
| 43 | 13.69 | 31.48 | 17.40 |
| 44 | 125.83 | 325.07 | 174.00 |
| 45 | 48.20 | 492.12 | 60.42 |
| 46 | 8.47 | 17.85 | 11.40 |
| 47 | 16.99 | 6.64 | 35.60 |
| 48 | 35.70 | 10.07 | 60.60 |
| 49 | 23.37 | 6.65 | 42.20 |
| 50 | 20.51 | 7.87 | 38.20 |
| 51 | 26.84 | 7.58 | 51.10 |
| 52 | 25.60 | 7.04 | 46.00 |
| 53 | 28.37 | 128.18 | 25.03 |
| 54 | 107.04 | 118.79 | 97.40 |
| 55 | 261.38 | 595.82 | 156.56 |
| 56 | 15.02 | 66.73 | 11.48 |
| 57 | 21.12 | 19.29 | 15.70 |
| 58 | 9.38 | 7.19 | 5.76 |
| 59 | 13.64 | 13.50 | 10.31 |
| 60 | 22.52 | 11.72 | 13.02 |
| 61 | 68.26 | 42.99 | 40.20 |
| 62 | 20.32 | 13.38 | 12.93 |
| 63 | 95.38 | 54.34 | 52.60 |
| 64 | 9.09 | 6.08 | 7.47 |
| 65 | 16.49 | 6.63 | 10.17 |
| 66 | 33.77 | 11.02 | 31.42 |
| 67 | 36.52 | 10.23 | 21.65 |
| 68 | 16.66 | 9.42 | 10.80 |
| 69 | 15.30 | 17.28 | 14.69 |
| 70 | 41.39 | 83.11 | 38.80 |
| 71 | 27.79 | 53.55 | 26.61 |
| 72 | 20.37 | 77.53 | 25.04 |
| 74 | 13.47 | 18.34 | 13.70 |
| 76 | 39.21 | 189.87 | 40.32 |
| 78 | 50.98 | 323.16 | 52.52 |
| 79 | 243.25 | 2512.19 | 295.89 |
| 80 | 48.63 | 64.39 | 42.55 |
| 81 | 49.87 | 67.40 | 49.36 |
| 82 | 90.13 | 72.47 | 109.18 |
| 83 | 29.30 | 55.99 | 28.11 |
| 84 | 38.20 | n.d. | n.d. |
| 88 | 33.03 | n.d. | n.d. |
| 89 | 45.29 | n.d. | n.d. |
| 90 | 336.00 | n.d. | n.d. |
| 92 | 58.86 | n.d. | n.d. |
| 93 | 48.35 | n.d. | n.d. |
| 94 | 66.49 | n.d. | n.d. |
| 95 | 18.49 | n.d. | n.d. |
| 96 | 43.99 | n.d. | n.d. |
| 97 | 40.39 | n.d. | n.d. |
| 100 | 15.01 | n.d. | n.d. |
| 101 | 83.50 | n.d. | n.d. |
| 102 | 169.50 | n.d. | n.d. |
| 105 | 8.12 | n.d. | n.d. |
| 106 | 9.66 | n.d. | n.d. |
| 107 | 186.50 | n.d. | n.d. |
| 108 | 326.00 | n.d. | n.d. |
| 109 | 278.00 | n.d. | n.d. |
| 112 | 7.23 | n.d. | n.d. |
| 113 | 158.50 | n.d. | n.d. |
| 115 | 92.20 | n.d. | n.d. |
| 116 | 10.61 | n.d. | n.d. |
| 118 | 18.27 | n.d. | n.d. |
| 120 | 10.17 | n.d. | n.d. |
| 121 | 11.87 | n.d. | n.d. |
| 122 | 14.53 | n.d. | n.d. |
| 123 | 12.74 | n.d. | n.d. |
| 124 | 10.58 | n.d. | n.d. |
| 126 | 8.51 | n.d. | n.d. |
| 127 | 10.27 | n.d. | n.d. |
| 128 | 9.83 | n.d. | n.d. |
| 129 | 12.30 | n.d. | n.d. |
| 130 | 7.38 | n.d. | n.d. |
| 132 | 8.48 | n.d. | n.d. |
| 133 | 13.44 | n.d. | n.d. |
| 134 | 17.34 | n.d. | n.d. |
| 135 | 11.49 | n.d. | n.d. |
| 136 | 11.84 | n.d. | n.d. |
| 139 | 7.35 | n.d. | n.d. |
| 142 | 12.89 | n.d. | n.d. |
| 143 | 14.20 | n.d. | n.d. |
| 144 | 16.22 | n.d. | n.d. |
| 145 | 7.63 | n.d. | n.d. |
| 146 | 12.25 | n.d. | n.d. |
| 147 | 10.11 | n.d. | n.d. |
| 148 | 8.48 | n.d. | n.d. |
| 150 | 11.53 | n.d. | n.d |
| 151 | 8.66 | n.d. | n.d. |
| 152 | 9.43 | n.d. | n.d. |
| 153 | 9.98 | n.d. | n.d. |
| 155 | 11.02 | n.d. | n.d. |
| 156 | 9.22 | n.d. | n.d. |
| 157 | 12.08 | n.d. | n.d. |
| 158 | 8.70 | n.d. | n.d. |
| 161 | 252.21 | n.d. | n.d. |
| 162 | 270.04 | n.d. | n.d. |
| 163 | 374.50 | n.d. | n.d. |
| 164 | 102.76 | 87.97 | 141.14 |
| 165 | 173.00 | n.d. | n.d. |
| 166 | 159.50 | n.d. | n.d. |
| 167 | 309.50 | n.d. | n.d. |
| 168 | 46.10 | n.d. | n.d. |
| 169 | 59.60 | n.d. | n.d. |
| 170 | 233.50 | n.d. | n.d. |
| 171 | 266.50 | n.d. | n.d. |
| 172 | 253.50 | n.d. | n.d. |
| 174 | 76.95 | n.d. | n.d. |
| 175 | 90.85 | n.d. | n.d. |
| 176 | 71.75 | n.d. | n.d. |
| 177 | 48.65 | n.d. | n.d. |
| 180 | 405.50 | n.d. | n.d. |
| 181 | 137.00 | n.d. | n.d. |
| 182 | 123.00 | n.d. | n.d. |
| 183 | 73.80 | n.d. | n.d. |
| 184 | 216.00 | n.d | n.d. |
| 185 | 13.85 | n.d. | n.d. |
| 186 | 123.85 | n.d. | n.d. |
| 187 | 67.44 | 67.47 | 63.20 |
| 188 | 59.65 | 70.96 | 63.70 |
| 190 | 152.41 | 479.17 | 238.78 |
| 192 | 102.27 | 98.00 | 148.81 |
| 193 | 108.18 | 71.30 | 151.49 |
| 194 | 127.68 | 129.00 | 139.93 |
| 195 | 74.51 | 56.60 | 71.84 |
| 196 | 75.28 | 31.70 | 126.80 |
| 197 | 68.32 | 48.00 | 101.65 |
| 198 | 86.54 | 65.10 | 86.91 |
| 199 | 163.23 | 153.00 | 231.19 |
| 200 | 73.11 | 46.20 | 110.64 |
| 201 | 100.55 | 69.80 | 98.56 |
| 202 | 100.50 | 71.70 | 127.68 |
| 203 | 96.88 | 89.20 | 101.69 |
| 204 | 102.74 | 65.70 | 93.49 |
| 205 | 130.74 | 127.00 | 113.32 |
| 206 | 107.18 | 93.70 | 150.82 |
| 207 | 146.88 | 128.00 | 188.80 |
| 208 | 169.64 | 127.95 | 254.61 |
| 209 | 164.10 | 118.21 | 231.66 |
| 211 | 58.80 | 151.66 | 68.55 |
| 212 | 113.42 | 286.97 | 153.33 |
| 216 | 151.60 | 346.64 | 262.81 |
| 217 | 7.62 | 5.39 | n.d. |
| 219 | 221.50 | 422.46 | n.d. |
| 220 | 95.55 | 110.49 | n.d. |
| 221 | 202.49 | 162.48 | n.d. |
| 222 | 327.48 | 200.50 | n.d. |
| 223 | 80.85 | 79.52 | n.d. |
| 224 | 226.96 | 250.98 | n.d. |
| 225 | 127.98 | 61.60 | n.d. |
| 226 | 64.09 | 43.53 | n.d. |
| 227 | 61.35 | 40.75 | n.d. |
| 228 | 49.19 | 30.10 | n.d. |
| 229 | 62.87 | 469.79 | 82.08 |
| 261 | 56.32 | 1.12 | 49.40 |
| 262 | 10.48 | 7.65 | 5.74 |
| 271 | 6.94 | 0.84 | 9.51 |
| 272 | 20.80 | 1.31 | 21.74 |
| 274 | 19.47 | 71.25 | 19.95 |
| 275 | 31.15 | 101.21 | 20.00 |
| 278 | 10.48 | 7.65 | 5.74 |
| 279 | 210.23 | 380.23 | 250.95 |
| 281 | 9.87 | 20.04 | 7.11 |
| 282 | 34.04 | 40.15 | 26.60 |
| 284 | 51.40 | 69.52 | 39.71 |
| 286 | 15.57 | 29.08 | 12.99 |
| 291 | 28.89 | 11.09 | 28.36 |
| 292 | 8.48 | 8.56 | 8.77 |
| 293 | 29.23 | 5.06 | 27.60 |
| 294 | 208.98 | 42.34 | 182.99 |
| 295 | 9.23 | 49.40 | 9.87 |
| 297 | 21.30 | 33.10 | 21.54 |
| 298 | 93.60 | 65.80 | 56.70 |
| 301 | 23.68 | 23.70 | 16.31 |

n.d.: not determined

### Example 5: Analyzing Conformational and Thermal Stability of GLP-1RA/FGF21 Fc Fusion Proteins

[0240] Conformational stability and propensity to aggregate was determined simultaneously for the GLP-1RA/FGF21 Fc fusion proteins using a UNit (Unchained Labs, Calif., USA). The UNit combines the analysis of intrinsic fluorescence of a protein or polypeptide to detect unfolding of the protein or polypeptide and a Static Light Scattering (SLS) measurement in order to investigate aggregation behavior.

[0241] Data were acquired for the fusion proteins at a concentration of 5 mg/mL formulated in phosphate buffer at pH 7.4. A volume of 9 μL of each sample were loaded into a UNi capillary holder and analyzed in triplicate on the UNit. The temperature was increased from 20 to 95° C. at a constant linear rate of 0.3° C./minutes. The BaryCentric Mean (BCM) indicating the intrinsic fluorescence and SLS signals detected with a 266 nm laser were plotted against the applied temperature in order to obtain melting temperatures (Tm) and aggregation onset temperatures (Tagg). Data were analyzed using the UNit Analysis software v. 2.1 and are summarized in Table 5.

[0242] In addition, for some proteins a thermal shift assay was applied to analyze thermostability in imitation of differential scanning fluorimetry (DSF or ThermoFluor™) assays (Ahmad S. et al. (2012) Protein Science 21: 433-446; Pantoliano et al. (2001) J. Biomol. Screen 6: 429-440; Niesen et al. (2007) Nat. Protoc. 2: 2212-21). This assay is based on the observation that hydrophobic fluorescent dyes, such as Sypro™ Orange (Life Technologies, cat. No. S6651), increase their fluorescence when they bind to hydrophobic patches on a protein. Such hydrophobic patches are exposed in proteins when they unfold upon heating, so that the increase in fluorescence can be used as a measure for the degree of unfolding and, hence, for the thermostability of the proteins.

[0243] Proteins were tested by mixing a solution of each protein in PBS (Gibco) with a 160× solution of Sypro™Orange (diluted in water from a 5000×DMSO stock as provided by the supplier). The sample volume was adjusted to 20 μL with PBS. Typical conditions contained 0.8 mg/mL protein and 8× Sypro™Orange in the final mixture, but protein concentrations could be varied between 0.4 mg/mL and 1.2 mg/mL. Samples were dispensed in 96-well PCR plates (BioRad Semi-Skirt 96 white) and shortly centrifuged to remove air bubbles. Plates were inserted in a BioRad iQ5 real-time PCR instrument and subjected to a thermal gradient from 10 to 90° C. at a ramp speed of 1° C./minute. For excitation and quantification of fluorescence, filters for wavelengths of 485 nm and 575 nm were chosen. BioRad iQ5 Standard Edition software (v. 2.0.148.60623) was used for data processing. In curves of fluorescence intensity against temperature, the inflection point was chosen as the measure for the melting temperature (Tm).

TABLE 5
Melting and aggregation temperatures of G-FGF21 (SEQ ID NO: 252)
and selected GLP-1RA/FGF21 Fc fusion proteins.

| | Tm | Tagg |
|---|---|---|
| SEQ ID NO | (° C.) | (° C.) |
| 252 | 43.1* | n.d. |
| 2 | 69.6 | 71.5 |
| 7 | 68.7 | 66.1 |
| 8 | 68.6 | 65.3 |
| 4 | 64.9 | 64.0 |
| 6 | 64.1 | 63.4 |
| 3 | 63.9 | 65.3 |
| 5 | 62.6 | 63.2 |
| 1 | 70.5 | 75.5 |

*Data generated via DSF; n.d .: not determined

### Example 6: Pharmacokinetics in Mouse and Non-Human Primate

[0244] Plasma concentrations and pharmacokinetic parameters of GLP-1 RA/FGF21 Fc fusion proteins were determined after single subcutaneous administration of 0.3 mg/kg in solution to female C57BI/6 mice or male Cynomolgus monkeys using three different methods. Blood samples were obtained at time points from 30 minutes to 168 hours after dosing.

[0245] a.) Bioanalytical Screening Method for Quantification of the Intact FGF21 Part of the GLP-1 RA/FGF21 Fc Fusion Proteins

[0246] Plasma samples were analyzed for the intact FGF21 part of the fusion proteins with an ELISA kit (F1231-K01, Eagle Biosciences, USA). The assay utilized the two-site sandwich technique with two selected antibodies that bound to different epitopes of human intact FGF21. One of the antibodies specifically bounds to the N-terminal amino acids (aa) 29-35 of human FGF21 and the other antibody specifically bound to the C-terminus (aa 203-209) of human FGF21. Assay standards, controls and unknown samples were added directly to wells of microplate that is coated with an anti-human FGF21 (aa 29-35)-specific antibody. Simultaneously, a horseradish peroxidase conjugated anti-human FGF21 (aa 203-209)-specific antibody was added to each well. After the first incubation period, the antibody on the walls of microtiter wells captured human FGF21 in the sample and unbound protein in each microtiter well is washed away. A “sandwich” of “anti-FGF21 antibody-human intact FGF21-HRP conjugated tracer antibody” was formed. The unbound tracer antibody was removed in the subsequent washing step. For the detection of this immunocomplex, the well was then incubated with a substrate solution in a timed reaction and then measured in a spectrophotometric microplate reader. The enzymatic activity of the immunocomplex bound to human intact FGF21 on the walls of the microtiter wells was directly proportional to the amount of intact FGF21 in the sample.

[0247] b.) Bioanalytical Screening Method for Quantification of the Intact Full-Length Fusions Proteins

[0248] The concentration of the full-length GLP-1RA/FGF21 Fc fusion proteins in plasma were determined utilizing an ELISA method. The N-terminus of the fusion proteins were captured by a mouse monoclonal anti-GLP1 antibody (Mesoscale Discovery, MSD). Following blocking the plates with 150 μL of Blocker A (MSD) for 1 hour at room temperature (RT) with gentle shaking and washing 3 times with 300 μL wash buffer 50 μL of diluted plasma samples (standards and PK study samples) were added to each well and the plates were incubated for 1 hour at RT with gentle shaking. Following washing 3 times with 300 μL wash buffer 50 μL of the primer detection antibody (C-terminus rabbit anti-FGF21 antibody, Pineda Antikörper-Service, Berlin, Germany) was added to each well and the plates were incubated for 1 hour at RT. Following washing 3 times with 300 μL wash buffer 25 μL goat-anti-rabbit antibody (Sulfo-Tag labelled, MSD) diluted in PBS-Tween 0.05% (PBS-T) was added to each well and the plates were incubated for 1 hour at RT. Following washing 3 times with 300 μL PBS-T 150 μL read buffer was added to the wells.

[0249] c.) Bioanalytical Screening Method for Quantification of the Intact GLP-1 Part of the GLP-1 FGF21 Fc Fusion Proteins

[0250] Plasma samples were analyzed for the intact GLP-1 part of the fusion proteins with a GLP-1 ELISA method. The ELISA plates were coated with mouse monoclonal anti-GLP-1 antibody (Mesoscale Discovery, MSD). Following blocking with 150 μL of Blocker A (MSD) for 1 hour at room temperature (RT) with gentle shaking and washing 3 times with 300 μL PBS-T, 50 μL of diluted plasma samples (standards and PK study samples) were added to each well and the plates were incubated for 1 hour at RT with gentle shaking. Following washing 3 times with 300 μL PBS-T, 25 μL of goat anti-human IgG diluted ( 1/3,333) in PBS-T (Sulfo-Tag labelled, MSD) was added to each well and the plates were incubated for 1 hour at RT. Following washing 3 times with 300 μL PBS-T, 150 μL read buffer was added to the wells.

[0251] The pharmacokinetic parameters were calculated by the program WinNonlin 6.4 using a non-compartmental model and linear trapezoidal interpolation calculation. The results are presented in FIGS. 7 and 8 as well as in Table 6. The results show that the novel GLP-1 RA/FGF21 Fc fusion proteins maintained their plasma levels in the ng/mL range with half-lives up to 20-40 hours.

TABLE 6
Terminal half-lives of selected GLP-1RA/FGF21 Fc fusion proteins
and G-FGF21 (SEQ ID NO: 252) after subcutaneous injection of
0.3 mg/kg in mouse and non-human primate.

| | | t_{1/2} mouse | t_{1/2} monkey |
|---|---|---|---|
| SEQ ID NO | Assay | (h) | (h) |
| 2 | FGF21 intact | 27.6 | 42.5 |
| | GLP-1 intact | 27.8 | 33.4 |
| | full-length | 16.1 | 23.5 |
| 7 | FGF21 intact | 14.2 | 31.7 |
| | GLP-1 intact | n.d. | 21.3 |
| | full-length | 13.9 | 28.7 |
| 8 | FGF21 intact | 17.9 | 33.6 |
| | GLP-1 intact | n.d. | 23.7 |
| | full-length | 13.3 | 27.6 |
| 252 | FGF21 intact | 0.7 | n.d. |
| | GLP-1 intact | n.d. | n.d. |
| | full-length | n.d. | n.d. |

n.d.: not determined

### Example 7: In Vivo Efficacy in Murine Models

[0252] a.) Multiple Dose Diet-Induced Obese (DIO) Mice

[0253] Female C57BL/6N Charles River mice were housed in groups in a specific pathogen-free barrier facility on a 12 hour light/12 hour dark cycle with free access to water and standard or high-fat diet (ssniff adjusted Fat Diet E15797). After 20 weeks of pre-feeding on high-fat diet, mice were stratified for body weight to treatment groups (n=8), so that each group had similar mean body weight. An age-matched group with ad-libitum access to standard chow (ssniff R/M-H, V1534-0) was included as standard control group. A dulaglutide treated group was also included as comparator. Prior to the start of treatment, mice were subcutaneously (s.c.) injected with vehicle solution and weighed for 3 days to acclimate them to the procedures.

[0254] 1) Acute effect on blood glucose in fed female DIO mice: initial blood samples were taken just before first administration (s.c.) of vehicle (phosphate buffer solution) or first administration of GLP-1 RA/FGF21 Fc fusion proteins (dissolved in phosphate buffer), respectively. The volume of administration was 5 or 10 mL/kg, depending on concentration of stock solution. The animals had access to water and their corresponding diet during the experiment. Blood glucose levels were measured at t=0 hours, t=1 hour, t=2 hours, t=3 hours, t=4 hours, t=6 hours and t=24 hours (method: Accu-Check glucometer). Blood sampling was performed by tail incision without anaesthesia.

[0255] 2) Chronic effect on body weight in female DIO mice: mice were treated once weekly, every 8^{th} day in the morning at the beginning of the light phase with either vehicle or test compounds for 4 weeks. Body weight and food consumption were recorded daily. Two days before start of treatment and on day 26, total fat mass was measured by nuclear magnetic resonance (NMR).

[0256] The effect of the fusion proteins on body weight and food consumption is shown in FIG. 9 and FIG. 10, respectively. Although animals treated with the fusion protein of SEQ ID NO: 8 or SEQ ID NO: 7 cumulatively consumed more food than vehicle or dulaglutide treated animals by the end of the study, they significantly lost more body weight than the vehicle or dulaglutide treated animals. This clearly demonstrates the balancing of the GLP-1 receptor activity versus the FGF21 mimetic activity of both molecules of SEQ ID NO: 7 and SEQ ID NO: 8 because their effect on body weight reduction did not need suppression of food consumption in order to materialize.

[0257] b.) Blood Glucose-Lowering Effects of Multiple, Subcutaneous Doses in Fed, Female Diabetic db/db Mice

[0258] Animals, Study Design (Pre-Dosing Phase, Dosing Phase), Pharmacological Intervention

[0259] Female, healthy, lean (BKS.Cg-(lean)/OlaHsd or BKS.Cg-Dock7(m)+/+Lepr(db)J) and diabetes-prone, obese db/db (BKS.Cg-+Leprdb/+Leprdb/OlaHsd or BKS.CG-m+/+Lepr(db)/J) mice were ordered from Envigo RMS Inc. or Charles River Laboratories. All animals were group housed in shoebox cages with wood chip bedding and were acclimated for approximately 2 to 3 weeks prior to dosing phase.

[0260] Mice were housed under vivarium conditions including a 12 hour light/12 hour dark cycle (light phase 04:00 AM-4:00 PM), a room temperature between 20-26° C. and a relative humidity between 30-70%. All animals had free access to Greenfield city water and a Purina Fomulab Diet 5008. At the study start mice were approximately 10-12 weeks old.

[0261] Pre-Dose Phase (15 Days)

[0262] Blood was collected for a HbA1c and blood glucose measurement on day 9 via tail clips. Blood glucose concentrations were measured using AlphaTRAK glucometers extended range (code 29 strips). Glucometer measurements were taken prior to any other in life activities and were performed in duplicate. If the values differed by more than 20 mg/dL (calculated glucometer value) a third value was recorded. Body mass measurements were collected on days 9 and 15. HbA1c and body mass values were used for block randomization. Animals were assigned to treatment groups (n=8/group) and to new cages and cage mates (n=4 animals/cage) on day 15 according to block randomization results. The lean group was included in the study as an age-matched, healthy reference group.

[0263] Dose Formulation and Dosing

[0264] Animals were either treated with a subcutaneous injection volume of 5 ml/kg of vehicle (sterile PBS), dulaglutide, SEQ ID NO: 8 or SEQ ID NO: 7 once on days 1, 8, 15, 22, and 27 of the dosing phase. Dosing was completed between 10:00 and 12:00 AM and was adjusted to the most recent body mass recording of each individual. Injection solutions including Trulicity (Dulaglutide Pen) were prepared by addition of sterile PBS to the stock solutions or Pen formulation in order to achieve the appropriate concentrations.

[0265] Dosinq Phase (36 Days)

[0266] 1) Blood glucose concentrations in morning-fed animals: Animals had unlimited access to water and feed during the experiment. Blood glucose was measured prior to any other in life activities between 10:00 to 12:00 AM on days 1, 2, 8, 9, 15, 16, 22, 23, 27, and 28 as well as 24 hours post-dose on days 2, 9, 16, 23, and 28. In addition, on days 1 and 22, blood was collected 1, 2, 3, 4, 6 and 24 hours post-dose (FIG. 11). Approximately 5 μL of blood were collected via tail clip and blood glucose measurements were performed in duplicate using AlphaTRAK glucometers with the extended range (code 29 strips). If the values differed by more than 20 mg/dL (calculated glucose value) then a third value was recorded. The Area Under the Curve (AUC) was calculated by the trapezoid method for each individual and time period as indicated.

[0267] 2) HbA1c analysis: Blood was collected via a tail clip on day 9 of the pre-dose phase and day 36 of the dosing phase. Blood was collected into a 5 μL non-additive micro capillary tube and immediately placed into a centrifuge tube containing hemolysate. The tube was shaken vigorously to mix the hemolysate with the blood and placed on a rocker to ensure the blood and reagent were completely mixed. Plasma HbA1c levels at study start and after study termination are shown in FIG. 12.

[0268] Statistical analyses: Data are depicted as means±SEM. For statistical analyses a One Way Analysis of Variance (ANOVA) and multiple comparisons (Dunnett's Method) were performed comparing the group of diabetic, obese db/db vehicle mice (n=8) with the group of diabetic, obese db/db test article treated mice (n=8). When the difference in the mean values of the two groups was greater than 0.05 they were considered statistically significantly different. Non-diabetic, lean-vehicle group data are depicted in FIGS. 11 and 12 and serve as a reference dataset for the non-obese, non-diabetic state.

[0269] In the animals treated with the fusion protein of SEQ ID NO: 8 or SEQ ID NO: 7, the lowering effect on blood glucose levels was significantly greater than in vehicle or dulaglutide treated animals (FIG. 11). The highest dose of the fusion protein of SEQ ID NO: 8 even lead to a reduction of blood glucose levels to normal non-diabetic animal levels over almost the whole 24 hour blood glucose profile measured on day 22 of treatment. In addition, animals treated with the fusion protein of SEQ ID NO: 8 or SEQ ID NO: 7 showed more pronounced suppression of HbA1c increase by the end of the study than vehicle or dulaglutide treated animals, as shown in FIG. 12.

[0270] c.) DIO-NASH Mouse Model

[0271] Animals and Experimental Set-Up

[0272] All animal experiments were conformed to international accepted principles for the care and use of laboratory animals.

[0273] Male C57BI/6J mice at 5 weeks of age were obtained from JanVier (JanVier labs, France), and each group housed 5 animals per cage under a 12 hour dark/12 hour light cycle. Room temperature was controlled to 22° C. 1° C., with 50%±10% humidity. Animals had ad libitum access to diet high in fat (40%, of these 18% trans-fat), 40% carbohydrates (20% fructose) and 2% cholesterol (D09100301, Research Diet, United States) previously described as the AMLN diet (Clapper et al. (2013) Am J Physiol Gastrointest Liver Physiol 305: G483-G495), or regular rodent chow (Altromin 1324, Brogaarden, Denmark), and tap water (lean chow, n=10-12). After 26 weeks, liver biopsies were performed for histological assessment of individual fibrosis and steatosis staging at baseline.

[0274] Mice were pretreated with enrofloxazin (Bayer, Germany) (5 mg/mL/1 mL/kg) one day before being biopsied. Prior to biopsy, mice were anesthetized with isoflurane (2%-3%) in 100% oxygen. A small abdominal incision in the midline was made and the left lateral lobe of the liver was exposed. A cone shaped wedge of liver tissue (50-100 mg) was excised from the distal portion of the lobe fixed in 4% paraformaldehyde for histology. The biopsy procedure previously described by Clapper et al. was refined using electrocoagulation of the cut surface of the liver by means of bipolar coagulation using ERBE VIO 1000 electrosurgical unit (ERBE, United States). The liver was returned to the abdominal cavity, abdominal wall was sutured and skin stapled. Carprofen (Pfizer, United States) (5 mg/mL-0.01 mL/10 g) and enrofloxazin (5 mg/mL-1 mL/kg) were administered intraperitoneal at the time of surgery and at post-operation day one and two, to control postoperative pain relief and infection, respectively. Following biopsy procedure animals were single housed and kept on AMLN diet for 3 weeks to recover. Stratification and randomization into study groups of 10-12 animals was based on individual disease staging as assessed by baseline liver biopsies.

[0275] Animals were then treated with 50 mg/kg GLP-1RA/FGF21 Fc fusion protein, 0.6 mg/kg dulaglutide, or vehicle (PBS) once-weekly subcutaneously injections for further 8 weeks either on AMLN or chow diet. Subsequently animals were euthanized, liver weights were determined, and liver tissue collected for histological and biochemical analyses (see FIG. 13).

[0276] Histology Assessment and Digital Image Analysis

[0277] Baseline liver biopsy and terminal samples were collected from the left lateral lobe (about 100 mg) and fixed overnight in 4% paraformaldehyde. Liver tissue was paraffin embedded and sectioned (3 μm thickness). To assess hepatic morphology and fibrosis, sections were stained with Hematoxylin and Eosin and Sirius Red, respectively, followed by analysis with Visiomorph software (Visiopharm, Denmark). Histological assessment and scoring was performed by a pathologist blinded to the study. NAFLD activity score (NAS) (steatosis, inflammation, ballooning degeneration) and fibrosis stage were performed using the clinical criteria outlined by Kleiner et al. (2005) Hepatology 41: 1313-1321. Data are presented in two different formats in FIG. 14 and FIG. 15.

[0278] The fusion protein of SEQ ID NO: 8 clearly shows effects on liver weight, liver total lipid content, liver cholesterol and triglyceride content and NAFLD activity score which are superior to those of GLP-1 agonism alone, the latter being exemplified by the effect of dulaglutide.

The application's sequence listing, which the Patent Office published only in electronic form, follows.

SEQUENCE LISTING (636 sequences)

SEQ ID NO: 1 - protein, 471 aa, Artificial Sequence
  Fusion Protein
HGEGTFTSDLSKQLEEERVQLFIEWLKATGPSSGAPPPSGGGGGGGSGGGGSGGGGSADKTHTCPPCPAPEAAGGPSVFLFPPKPKDTLMISRTPEVTCVVVDVSHEDPEVKFNWYVDGVEVHNAKTKPREEQYNSTYRVVSVLTVLHQDWLNGKEYKCKVSNKALPAPIEKTISKAKGQPREPQVYTLPPSRDELTKNQVSLTCLVKGFYPSDIAVEWESNGQPENNYKTTPPVLDSDGSFFLYSKLTVDKSRWQQGNVFSCSVMHEALHNHYTQKSLSLSPGGGGSGSAHPIPDSSPLLQFGGQVRQRYLYTDDACQTEAHLEIREDGTVGGAADQSPESLLQLKALKPGVIQILGVKTSRFLCQRPDGALYGSLHFDPEACSFRELLLEDGYNVYQSEAHGLPLHLPGCKSPHRDPAPRGPARFLPLPGLPPAPPEPPGILAPQPPDVGSSDPLSMVGSQGRSPSYAS

SEQ ID NO: 2 - protein, 472 aa, Artificial Sequence
  Fusion Protein
HGEGTFTSDLSKQLEEERVQLFIEWLKATGPSSGAPPPSGGGGGGGSGGGGSGGGGSADKTHTCPPCPAPEAAGGPSVFLFPPKPKDTLMISRTPEVTCVVVDVSHEDPEVKFNWYVDGVEVHNAKTKPREEQYNSTYRVVSVLTVLHQDWLNGKEYKCKVSNKALPAPIEKTISKAKGQPREPQVYTLPPSRDELTKNQVSLTCLVKGFYPSDIAVEWESNGQPENNYKTTPPVLDSDGSFFLYSKLTVDKSRWQQGNVFSCSVMHEALHNHYTQKSLSLSPGGGGSGSAHPIPDSSPLLQFGGQVRQRYLYTDDACQTEAHLEIREDGTVGGAADQSPESLLQLKALKPGVIQILGVKTSRFLCQRPDGALYGSLHFDPEACSFRELLLEDGYNVYQSEAHGLPLHLPGCKSPHRDPAPRGPARFLPLPGLPPAPPEPPGILAPQPPDVGSSDPLSMVYPSQGRSPSYAS

SEQ ID NO: 3 - protein, 472 aa, Artificial Sequence
  Fusion Protein
GHGEGTFTSDKSKQLEEEAVRLFIEWLKAGGPKKIRYSGGGGGGGSGGGGSGGGGSAESKYGPPCPPCPAPEFEGGPSVFLFPPKPKDTLMISRTPEVTCVVVDVSQEDPEVQFNWYVDGVEVHNAKTKPREEQFNSTYRVVSVLTVLHQDWLNGKEYKCKVSNKGLPSSIEKTISKAKGQPREPQVYTLPPSQEEMTKNQVSLTCLVKGFYPSDIAVEWESNGQPENNYKTTPPVLDSDGSFFLYSRLTVDKSRWQEGNVFSCSVMHEALHNHYTQKSLSLSLGGGGSGSAHPIPDSSPLLQFGGQVRQRYLYTDDACQTEAHLEIREDGTVGGAADQSPESLLQLKALKPGVIQILGVKTSRFLCQRPDGALYGSLHFDPEACSFRELLLEDGYNVYQSEAHGLPLHLPGCKSPHRDPAPRGPARFLPLPGLPPAPPEPPGILAPQPPDVGSSDPLSMVGSQGRSPSYAS

SEQ ID NO: 4 - protein, 473 aa, Artificial Sequence
  Fusion Protein
HGEGTFTSDLSKQLEEERVQLFIEWLKATGPSSGAPPPSGGGGGGGSGGGGSGGGGSAESKYGPPCPPCPAPEFEGGPSVFLFPPKPKDTLMISRTPEVTCVVVDVSQEDPEVQFNWYVDGVEVHNAKTKPREEQFNSTYRVVSVLTVLHQDWLNGKEYKCKVSNKGLPSSIEKTISKAKGQPREPQVYTLPPSQEEMTKNQVSLTCLVKGFYPSDIAVEWESNGQPENNYKTTPPVLDSDGSFFLYSRLTVDKSRWQEGNVFSCSVMHEALHNHYTQKSLSLSLGGGGSGSAHPIPDSSPLLQFGGQVRQRYLYTDDACQTEAHLEIREDGTVGGAADQSPESLLQLKALKPGVIQILGVKTSRFLCQRPDGALYGSLHFDPEACSFRELLLEDGYNVYQSEAHGLPLHLPGCKSPHRDPAPRGPARFLPLPGLPPAPPEPPGILAPQPPDVGSSDPLSMVGSQGRSPSYAS

SEQ ID NO: 5 - protein, 473 aa, Artificial Sequence
  Fusion Protein
GHGEGTFTSDKSKQLEEEAVRLFIEWLKAGGPKKIRYSGGGGGGGSGGGGSGGGGSAESKYGPPCPPCPAPEFEGGPSVFLFPPKPKDTLMISRTPEVTCVVVDVSQEDPEVQFNWYVDGVEVHNAKTKPREEQFNSTYRVVSVLTVLHQDWLNGKEYKCKVSNKGLPSSIEKTISKAKGQPREPQVYTLPPSQEEMTKNQVSLTCLVKGFYPSDIAVEWESNGQPENNYKTTPPVLDSDGSFFLYSRLTVDKSRWQEGNVFSCSVMHEALHNHYTQKSLSLSLGGGGSGSAHPIPDSSPLLQFGGQVRQRYLYTDDACQTEAHLEIREDGTVGGAADQSPESLLQLKALKPGVIQILGVKTSRFLCQRPDGALYGSLHFDPEACSFRELLLEDGYNVYQSEAHGLPLHLPGCKSPHRDPAPRGPARFLPLPGLPPAPPEPPGILAPQPPDVGSSDPLSMVYPSQGRSPSYAS

SEQ ID NO: 6 - protein, 474 aa, Artificial Sequence
  Fusion Protein
HGEGTFTSDLSKQLEEERVQLFIEWLKATGPSSGAPPPSGGGGGGGSGGGGSGGGGSAESKYGPPCPPCPAPEFEGGPSVFLFPPKPKDTLMISRTPEVTCVVVDVSQEDPEVQFNWYVDGVEVHNAKTKPREEQFNSTYRVVSVLTVLHQDWLNGKEYKCKVSNKGLPSSIEKTISKAKGQPREPQVYTLPPSQEEMTKNQVSLTCLVKGFYPSDIAVEWESNGQPENNYKTTPPVLDSDGSFFLYSRLTVDKSRWQEGNVFSCSVMHEALHNHYTQKSLSLSLGGGGSGSAHPIPDSSPLLQFGGQVRQRYLYTDDACQTEAHLEIREDGTVGGAADQSPESLLQLKALKPGVIQILGVKTSRFLCQRPDGALYGSLHFDPEACSFRELLLEDGYNVYQSEAHGLPLHLPGCKSPHRDPAPRGPARFLPLPGLPPAPPEPPGILAPQPPDVGSSDPLSMVYPSQGRSPSYAS

SEQ ID NO: 7 - protein, 470 aa, Artificial Sequence
  Fusion Protein
GHGEGTFTSDKSKQLEEEAVRLFIEWLKAGGPKKIRYSGGGGGGGSGGGGSGGGGSADKTHTCPPCPAPEAAGGPSVFLFPPKPKDTLMISRTPEVTCVVVDVSHEDPEVKFNWYVDGVEVHNAKTKPREEQYNSTYRVVSVLTVLHQDWLNGKEYKCKVSNKALPAPIEKTISKAKGQPREPQVYTLPPSRDELTKNQVSLTCLVKGFYPSDIAVEWESNGQPENNYKTTPPVLDSDGSFFLYSKLTVDKSRWQQGNVFSCSVMHEALHNHYTQKSLSLSPGGGGSGSAHPIPDSSPLLQFGGQVRQRYLYTDDACQTEAHLEIREDGTVGGAADQSPESLLQLKALKPGVIQILGVKTSRFLCQRPDGALYGSLHFDPEACSFRELLLEDGYNVYQSEAHGLPLHLPGCKSPHRDPAPRGPARFLPLPGLPPAPPEPPGILAPQPPDVGSSDPLSMVGSQGRSPSYAS

SEQ ID NO: 8 - protein, 471 aa, Artificial Sequence
  Fusion Protein
GHGEGTFTSDKSKQLEEEAVRLFIEWLKAGGPKKIRYSGGGGGGGSGGGGSGGGGSADKTHTCPPCPAPEAAGGPSVFLFPPKPKDTLMISRTPEVTCVVVDVSHEDPEVKFNWYVDGVEVHNAKTKPREEQYNSTYRVVSVLTVLHQDWLNGKEYKCKVSNKALPAPIEKTISKAKGQPREPQVYTLPPSRDELTKNQVSLTCLVKGFYPSDIAVEWESNGQPENNYKTTPPVLDSDGSFFLYSKLTVDKSRWQQGNVFSCSVMHEALHNHYTQKSLSLSPGGGGSGSAHPIPDSSPLLQFGGQVRQRYLYTDDACQTEAHLEIREDGTVGGAADQSPESLLQLKALKPGVIQILGVKTSRFLCQRPDGALYGSLHFDPEACSFRELLLEDGYNVYQSEAHGLPLHLPGCKSPHRDPAPRGPARFLPLPGLPPAPPEPPGILAPQPPDVGSSDPLSMVYPSQGRSPSYAS

SEQ ID NO: 9 - protein, 467 aa, Artificial Sequence
  Fusion Protein
HGEGTFTSDLSKQMEEEAVRLFIEWLKNGGPSSGAPPPSESKYGPPCPPCPAPEFEGGPSVFLFPPKPKDTLMISRTPEVTCVVVDVSQEDPEVQFNWYVDGVEVHNAKTKPREEQFNSTYRVVSVLTVLHQDWLNGKEYKCKVSNKGLPSSIEKTISKAKGQPREPQVYTLPPSQEEMTKNQVSLTCLVKGFYPSDIAVEWESNGQPENNYKTTPPVLDSDGSFFLYSRLTVDKSRWQEGNVFSCSVMHEALHNHYTQKSLSLSLGGGGGGGGSGGGGSGGGGSAHPIPDSSPLLQFGGQVRQRYLYTDDAQQTEAHLEIREDGTVGGAADQSPESLLQLKALKPGVIQILGVKTSRFLCQRPDGALYGSLHFDPEACSFRELLLEDGYNVYQSEAHGLPLHLPGNKSPHRDPAPRGPARFLPLPGLPPAPPEPPGILAPQPPDVGSSDPLSMVGPSQGRSPSYAS

SEQ ID NO: 10 - protein, 463 aa, Artificial Sequence
  Fusion Protein
HGEGTFTSDLSKQMEEEAVRLFIEWLKNGGPSSGAPPPSESKYGPPCPPCPAPEFEGGPSVFLFPPKPKDTLMISRTPEVTCVVVDVSQEDPEVQFNWYVDGVEVHNAKTKPREEQFNSTYRVVSVLTVLHQDWLNGKEYKCKVSNKGLPSSIEKTISKAKGQPREPQVYTLPPSQEEMTKNQVSLTCLVKGFYPSDIAVEWESNGQPENNYKTTPPVLDSDGSFFLYSRLTVDKSRWQEGNVFSCSVMHEALHNHYTQKSLSLSLGGGGSGGGGSGGGGSAHPIPDSSPLLQFGGQVRQRYLYTDDAQQTEAHLEIREDGTVGGAADQSPESLLQLKALKPGVIQILGVKTSRFLCQRPDGALYGSLHFDPEACSFRELLLEDGYNVYQSEAHGLPLHLPGNKSPHRDPAPRGPARFLPLPGLPPAPPEPPGILAPQPPDVGSSDPLSMVGPSQGRSPSYAS

SEQ ID NO: 11 - protein, 459 aa, Artificial Sequence
  Fusion Protein
HGEGTFTSDLSKQMEEEAVRLFIEWLKNGGPSSGAPPPSESKYGPPCPPCPAPEFEGGPSVFLFPPKPKDTLMISRTPEVTCVVVDVSQEDPEVQFNWYVDGVEVHNAKTKPREEQFNSTYRVVSVLTVLHQDWLNGKEYKCKVSNKGLPSSIEKTISKAKGQPREPQVYTLPPSQEEMTKNQVSLTCLVKGFYPSDIAVEWESNGQPENNYKTTPPVLDSDGSFFLYSRLTVDKSRWQEGNVFSCSVMHEALHNHYTQKSLSLSLGGGGSGGSGGSAHPIPDSSPLLQFGGQVRQRYLYTDDAQQTEAHLEIREDGTVGGAADQSPESLLQLKALKPGVIQILGVKTSRFLCQRPDGALYGSLHFDPEACSFRELLLEDGYNVYQSEAHGLPLHLPGNKSPHRDPAPRGPARFLPLPGLPPAPPEPPGILAPQPPDVGSSDPLSMVGPSQGRSPSYAS

SEQ ID NO: 12 - protein, 455 aa, Artificial Sequence
  Fusion Protein
HGEGTFTSDLSKQMEEEAVRLFIEWLKNGGPSSGAPPPSESKYGPPCPPCPAPEFEGGPSVFLFPPKPKDTLMISRTPEVTCVVVDVSQEDPEVQFNWYVDGVEVHNAKTKPREEQFNSTYRVVSVLTVLHQDWLNGKEYKCKVSNKGLPSSIEKTISKAKGQPREPQVYTLPPSQEEMTKNQVSLTCLVKGFYPSDIAVEWESNGQPENNYKTTPPVLDSDGSFFLYSRLTVDKSRWQEGNVFSCSVMHEALHNHYTQKSLSLSLGGGGSGSAHPIPDSSPLLQFGGQVRQRYLYTDDAQQTEAHLEIREDGTVGGAADQSPESLLQLKALKPGVIQILGVKTSRFLCQRPDGALYGSLHFDPEACSFRELLLEDGYNVYQSEAHGLPLHLPGNKSPHRDPAPRGPARFLPLPGLPPAPPEPPGILAPQPPDVGSSDPLSMVGPSQGRSPSYAS

SEQ ID NO: 13 - protein, 462 aa, Artificial Sequence
  Fusion Protein
HGEGTFTSDLSKQMEEEAVRLFIEWLKNGGPSSGAPPPSGGGSGSAESKYGPPCPPCPAPEFEGGPSVFLFPPKPKDTLMISRTPEVTCVVVDVSQEDPEVQFNWYVDGVEVHNAKTKPREEQFNSTYRVVSVLTVLHQDWLNGKEYKCKVSNKGLPSSIEKTISKAKGQPREPQVYTLPPSQEEMTKNQVSLTCLVKGFYPSDIAVEWESNGQPENNYKTTPPVLDSDGSFFLYSRLTVDKSRWQEGNVFSCSVMHEALHNHYTQKSLSLSLGGGGSGSAHPIPDSSPLLQFGGQVRQRYLYTDDAQQTEAHLEIREDGTVGGAADQSPESLLQLKALKPGVIQILGVKTSRFLCQRPDGALYGSLHFDPEACSFRELLLEDGYNVYQSEAHGLPLHLPGNKSPHRDPAPRGPARFLPLPGLPPAPPEPPGILAPQPPDVGSSDPLSMVGPSQGRSPSYAS

SEQ ID NO: 14 - protein, 466 aa, Artificial Sequence
  Fusion Protein
HGEGTFTSDLSKQMEEEAVRLFIEWLKNGGPSSGAPPPSGGGSGGSGGSAESKYGPPCPPCPAPEFEGGPSVFLFPPKPKDTLMISRTPEVTCVVVDVSQEDPEVQFNWYVDGVEVHNAKTKPREEQFNSTYRVVSVLTVLHQDWLNGKEYKCKVSNKGLPSSIEKTISKAKGQPREPQVYTLPPSQEEMTKNQVSLTCLVKGFYPSDIAVEWESNGQPENNYKTTPPVLDSDGSFFLYSRLTVDKSRWQEGNVFSCSVMHEALHNHYTQKSLSLSLGGGGSGSAHPIPDSSPLLQFGGQVRQRYLYTDDAQQTEAHLEIREDGTVGGAADQSPESLLQLKALKPGVIQILGVKTSRFLCQRPDGALYGSLHFDPEACSFRELLLEDGYNVYQSEAHGLPLHLPGNKSPHRDPAPRGPARFLPLPGLPPAPPEPPGILAPQPPDVGSSDPLSMVGPSQGRSPSYAS

SEQ ID NO: 15 - protein, 470 aa, Artificial Sequence
  Fusion Protein
HGEGTFTSDLSKQMEEEAVRLFIEWLKNGGPSSGAPPPSGGGSGGGGSGGGGSAESKYGPPCPPCPAPEFEGGPSVFLFPPKPKDTLMISRTPEVTCVVVDVSQEDPEVQFNWYVDGVEVHNAKTKPREEQFNSTYRVVSVLTVLHQDWLNGKEYKCKVSNKGLPSSIEKTISKAKGQPREPQVYTLPPSQEEMTKNQVSLTCLVKGFYPSDIAVEWESNGQPENNYKTTPPVLDSDGSFFLYSRLTVDKSRWQEGNVFSCSVMHEALHNHYTQKSLSLSLGGGGSGSAHPIPDSSPLLQFGGQVRQRYLYTDDAQQTEAHLEIREDGTVGGAADQSPESLLQLKALKPGVIQILGVKTSRFLCQRPDGALYGSLHFDPEACSFRELLLEDGYNVYQSEAHGLPLHLPGNKSPHRDPAPRGPARFLPLPGLPPAPPEPPGILAPQPPDVGSSDPLSMVGPSQGRSPSYAS

SEQ ID NO: 16 - protein, 473 aa, Artificial Sequence
  Fusion Protein
HGEGTFTSDLSKQLEEERVQLFIEWLKATGPSSGAPPPSGGGGGGGSGGGGSGGGGSAESKYGPPCPPCPAPEFEGGPSVFLFPPKPKDTLMISRTPEVTCVVVDVSQEDPEVQFNWYVDGVEVHNAKTKPREEQFNSTYRVVSVLTVLHQDWLNGKEYKCKVSNKGLPSSIEKTISKAKGQPREPQVYTLPPSQEEMTKNQVSLTCLVKGFYPSDIAVEWESNGQPENNYKTTPPVLDSDGSFFLYSRLTVDKSRWQEGNVFSCSVMHEALHNHYTQKSLSLSLGGGGSGSAHPIPDSSPLLQFGGQVRQRYLYTDDACQTEAHLEIREDGTVGGAADQSPESLLQLKALKPGVIQILGVKTSRFLCQRPDGALYGSLHFDPEACSFRELLLEDGYNVYQSEAHGLPLHLCGNKSPHRDPAPRGPARFLPLPGLPPAPPEPPGILAPQPPDVGSSDPLSMVGSQGRSPSYAS

SEQ ID NO: 17 - protein, 474 aa, Artificial Sequence
  Fusion Protein
HGEGTFTSDLSKQLEEERVQLFIEWLKATGPSSGAPPPSGGGGGGGSGGGGSGGGGSAESKYGPPCPPCPAPEFEGGPSVFLFPPKPKDTLMISRTPEVTCVVVDVSQEDPEVQFNWYVDGVEVHNAKTKPREEQFNSTYRVVSVLTVLHQDWLNGKEYKCKVSNKGLPSSIEKTISKAKGQPREPQVYTLPPSQEEMTKNQVSLTCLVKGFYPSDIAVEWESNGQPENNYKTTPPVLDSDGSFFLYSRLTVDKSRWQEGNVFSCSVMHEALHNHYTQKSLSLSLGGGGSGSAHPIPDSSPLLQFGGQVRQRYLYTDDACQTEAHLEIREDGTVGGAADQSPESLLQLKALKPGVIQILGVKTSRFLCQRPDGALYGSLHFDPEACSFRELLLEDGYNVYQSEAHGLPLHLCGNKSPHRDPAPRGPARFLPLPGLPPAPPEPPGILAPQPPDVGSSDPLSMVYPSQGRSPSYAS

SEQ ID NO: 18 - protein, 473 aa, Artificial Sequence
  Fusion Protein
HGEGTFTSDLSKQLEEERVQEFIEWLKAGGPSSGAPPPSGGGGGGGSGGGGSGGGGSAESKYGPPCPPCPAPEFEGGPSVFLFPPKPKDTLMISRTPEVTCVVVDVSQEDPEVQFNWYVDGVEVHNAKTKPREEQFNSTYRVVSVLTVLHQDWLNGKEYKCKVSNKGLPSSIEKTISKAKGQPREPQVYTLPPSQEEMTKNQVSLTCLVKGFYPSDIAVEWESNGQPENNYKTTPPVLDSDGSFFLYSRLTVDKSRWQEGNVFSCSVMHEALHNHYTQKSLSLSLGGGGSGSAHPIPDSSPLLQFGGQVRQRYLYTDDACQTEAHLEIREDGTVGGAADQSPESLLQLKALKPGVIQILGVKTSRFLCQRPDGALYGSLHFDPEACSFRELLLEDGYNVYQSEAHGLPLHLCGNKSPHRDPAPRGPARFLPLPGLPPAPPEPPGILAPQPPDVGSSDPLSMVGSQGRSPSYAS

SEQ ID NO: 19 - protein, 474 aa, Artificial Sequence
  Fusion Protein
HGEGTFTSDLSKQLEEERVQEFIEWLKAGGPSSGAPPPSGGGGGGGSGGGGSGGGGSAESKYGPPCPPCPAPEFEGGPSVFLFPPKPKDTLMISRTPEVTCVVVDVSQEDPEVQFNWYVDGVEVHNAKTKPREEQFNSTYRVVSVLTVLHQDWLNGKEYKCKVSNKGLPSSIEKTISKAKGQPREPQVYTLPPSQEEMTKNQVSLTCLVKGFYPSDIAVEWESNGQPENNYKTTPPVLDSDGSFFLYSRLTVDKSRWQEGNVFSCSVMHEALHNHYTQKSLSLSLGGGGSGSAHPIPDSSPLLQFGGQVRQRYLYTDDACQTEAHLEIREDGTVGGAADQSPESLLQLKALKPGVIQILGVKTSRFLCQRPDGALYGSLHFDPEACSFRELLLEDGYNVYQSEAHGLPLHLCGNKSPHRDPAPRGPARFLPLPGLPPAPPEPPGILAPQPPDVGSSDPLSMVYPSQGRSPSYAS

SEQ ID NO: 20 - protein, 474 aa, Artificial Sequence
  Fusion Protein
HGEGTFTSDLSKQLEEERVQEFIEWLKAGGPSSGAPPPSGGGGGGGSGGGGSGGGGSAESKYGPPCPPCPAPEFEGGPSVFLFPPKPKDTLMISRTPEVTCVVVDVSQEDPEVQFNWYVDGVEVHNAKTKPREEQFNSTYRVVSVLTVLHQDWLNGKEYKCKVSNKGLPSSIEKTISKAKGQPREPQVYTLPPSQEEMTKNQVSLTCLVKGFYPSDIAVEWESNGQPENNYKTTPPVLDSDGSFFLYSRLTVDKSRWQEGNVFSCSVMHEALHNHYTQKSLSLSLGGGGSGSAHPIPDSSPLLQFGGQVRQRYLYTDDACQTEAHLEIREDGTVGGAADQSPESLLQLKALKPGVIQILGVKTSRFLCQRPDGALYGSLHFDPEACSFRELLLEDGYNVYQSEAHGLPLHLPGCKSPHRDPAPRGPARFLPLPGLPPAPPEPPGILAPQPPDVGSSDPLSMVYPSQGRSPSYAS

SEQ ID NO: 21 - protein, 473 aa, Artificial Sequence
  Fusion Protein
HGEGTFTSDLSIQLEEEAVQEFIEWLLATGPSSGAPPPSGGGGGGGSGGGGSGGGGSAESKYGPPCPPCPAPEFEGGPSVFLFPPKPKDTLMISRTPEVTCVVVDVSQEDPEVQFNWYVDGVEVHNAKTKPREEQFNSTYRVVSVLTVLHQDWLNGKEYKCKVSNKGLPSSIEKTISKAKGQPREPQVYTLPPSQEEMTKNQVSLTCLVKGFYPSDIAVEWESNGQPENNYKTTPPVLDSDGSFFLYSRLTVDKSRWQEGNVFSCSVMHEALHNHYTQKSLSLSLGGGGSGSAHPIPDSSPLLQFGGQVRQRYLYTDDACQTEAHLEIREDGTVGGAADQSPESLLQLKALKPGVIQILGVKTSRFLCQRPDGALYGSLHFDPEACSFRELLLEDGYNVYQSEAHGLPLHLCGNKSPHRDPAPRGPARFLPLPGLPPAPPEPPGILAPQPPDVGSSDPLSMVGSQGRSPSYAS

SEQ ID NO: 22 - protein, 474 aa, Artificial Sequence
  Fusion Protein
HGEGTFTSDLSIQLEEEAVQEFIEWLLATGPSSGAPPPSGGGGGGGSGGGGSGGGGSAESKYGPPCPPCPAPEFEGGPSVFLFPPKPKDTLMISRTPEVTCVVVDVSQEDPEVQFNWYVDGVEVHNAKTKPREEQFNSTYRVVSVLTVLHQDWLNGKEYKCKVSNKGLPSSIEKTISKAKGQPREPQVYTLPPSQEEMTKNQVSLTCLVKGFYPSDIAVEWESNGQPENNYKTTPPVLDSDGSFFLYSRLTVDKSRWQEGNVFSCSVMHEALHNHYTQKSLSLSLGGGGSGSAHPIPDSSPLLQFGGQVRQRYLYTDDACQTEAHLEIREDGTVGGAADQSPESLLQLKALKPGVIQILGVKTSRFLCQRPDGALYGSLHFDPEACSFRELLLEDGYNVYQSEAHGLPLHLCGNKSPHRDPAPRGPARFLPLPGLPPAPPEPPGILAPQPPDVGSSDPLSMVYPSQGRSPSYAS

SEQ ID NO: 23 - protein, 473 aa, Artificial Sequence
  Fusion Protein
HGEGTFTSDLSIQLEEEAVQEFIEWLLATGPSSGAPPPSGGGGGGGSGGGGSGGGGSAESKYGPPCPPCPAPEFEGGPSVFLFPPKPKDTLMISRTPEVTCVVVDVSQEDPEVQFNWYVDGVEVHNAKTKPREEQFNSTYRVVSVLTVLHQDWLNGKEYKCKVSNKGLPSSIEKTISKAKGQPREPQVYTLPPSQEEMTKNQVSLTCLVKGFYPSDIAVEWESNGQPENNYKTTPPVLDSDGSFFLYSRLTVDKSRWQEGNVFSCSVMHEALHNHYTQKSLSLSLGGGGSGSAHPIPDSSPLLQFGGQVRQRYLYTDDACQTEAHLEIREDGTVGGAADQSPESLLQLKALKPGVIQILGVKTSRFLCQRPDGALYGSLHFDPEACSFRELLLEDGYNVYQSEAHGLPLHLPGCKSPHRDPAPRGPARFLPLPGLPPAPPEPPGILAPQPPDVGSSDPLSMVGSQGRSPSYAS

SEQ ID NO: 24 - protein, 474 aa, Artificial Sequence
  Fusion Protein
HGEGTFTSDLSIQLEEEAVQEFIEWLLATGPSSGAPPPSGGGGGGGSGGGGSGGGGSAESKYGPPCPPCPAPEFEGGPSVFLFPPKPKDTLMISRTPEVTCVVVDVSQEDPEVQFNWYVDGVEVHNAKTKPREEQFNSTYRVVSVLTVLHQDWLNGKEYKCKVSNKGLPSSIEKTISKAKGQPREPQVYTLPPSQEEMTKNQVSLTCLVKGFYPSDIAVEWESNGQPENNYKTTPPVLDSDGSFFLYSRLTVDKSRWQEGNVFSCSVMHEALHNHYTQKSLSLSLGGGGSGSAHPIPDSSPLLQFGGQVRQRYLYTDDACQTEAHLEIREDGTVGGAADQSPESLLQLKALKPGVIQILGVKTSRFLCQRPDGALYGSLHFDPEACSFRELLLEDGYNVYQSEAHGLPLHLPGCKSPHRDPAPRGPARFLPLPGLPPAPPEPPGILAPQPPDVGSSDPLSMVYPSQGRSPSYAS

SEQ ID NO: 25 - protein, 473 aa, Artificial Sequence
  Fusion Protein
HGEGTFTSDLSILLDEEAVRLFIEWLLATGPVSGAPPPSGGGGGGGSGGGGSGGGGSAESKYGPPCPPCPAPEFEGGPSVFLFPPKPKDTLMISRTPEVTCVVVDVSQEDPEVQFNWYVDGVEVHNAKTKPREEQFNSTYRVVSVLTVLHQDWLNGKEYKCKVSNKGLPSSIEKTISKAKGQPREPQVYTLPPSQEEMTKNQVSLTCLVKGFYPSDIAVEWESNGQPENNYKTTPPVLDSDGSFFLYSRLTVDKSRWQEGNVFSCSVMHEALHNHYTQKSLSLSLGGGGSGSAHPIPDSSPLLQFGGQVRQRYLYTDDACQTEAHLEIREDGTVGGAADQSPESLLQLKALKPGVIQILGVKTSRFLCQRPDGALYGSLHFDPEACSFRELLLEDGYNVYQSEAHGLPLHLCGNKSPHRDPAPRGPARFLPLPGLPPAPPEPPGILAPQPPDVGSSDPLSMVGSQGRSPSYAS

SEQ ID NO: 26 - protein, 473 aa, Artificial Sequence
  Fusion Protein
HGEGTFTSDLSILLDEEAVRLFIEWLLATGPVSGAPPPSGGGGGGGSGGGGSGGGGSAESKYGPPCPPCPAPEFEGGPSVFLFPPKPKDTLMISRTPEVTCVVVDVSQEDPEVQFNWYVDGVEVHNAKTKPREEQFNSTYRVVSVLTVLHQDWLNGKEYKCKVSNKGLPSSIEKTISKAKGQPREPQVYTLPPSQEEMTKNQVSLTCLVKGFYPSDIAVEWESNGQPENNYKTTPPVLDSDGSFFLYSRLTVDKSRWQEGNVFSCSVMHEALHNHYTQKSLSLSLGGGGSGSAHPIPDSSPLLQFGGQVRQRYLYTDDACQTEAHLEIREDGTVGGAADQSPESLLQLKALKPGVIQILGVKTSRFLCQRPDGALYGSLHFDPEACSFRELLLEDGYNVYQSEAHGLPLHLPGCKSPHRDPAPRGPARFLPLPGLPPAPPEPPGILAPQPPDVGSSDPLSMVGSQGRSPSYAS

SEQ ID NO: 27 - protein, 474 aa, Artificial Sequence
  Fusion Protein
HGEGTFTSDLSILLDEEAVRLFIEWLLATGPVSGAPPPSGGGGGGGSGGGGSGGGGSAESKYGPPCPPCPAPEFEGGPSVFLFPPKPKDTLMISRTPEVTCVVVDVSQEDPEVQFNWYVDGVEVHNAKTKPREEQFNSTYRVVSVLTVLHQDWLNGKEYKCKVSNKGLPSSIEKTISKAKGQPREPQVYTLPPSQEEMTKNQVSLTCLVKGFYPSDIAVEWESNGQPENNYKTTPPVLDSDGSFFLYSRLTVDKSRWQEGNVFSCSVMHEALHNHYTQKSLSLSLGGGGSGSAHPIPDSSPLLQFGGQVRQRYLYTDDACQTEAHLEIREDGTVGGAADQSPESLLQLKALKPGVIQILGVKTSRFLCQRPDGALYGSLHFDPEACSFRELLLEDGYNVYQSEAHGLPLHLPGCKSPHRDPAPRGPARFLPLPGLPPAPPEPPGILAPQPPDVGSSDPLSMVYPSQGRSPSYAS

SEQ ID NO: 28 - protein, 473 aa, Artificial Sequence
  Fusion Protein
HGEGTFTSDLSILLDEEAVREFIEWLLATGPVSGAPPPSGGGGGGGSGGGGSGGGGSAESKYGPPCPPCPAPEFEGGPSVFLFPPKPKDTLMISRTPEVTCVVVDVSQEDPEVQFNWYVDGVEVHNAKTKPREEQFNSTYRVVSVLTVLHQDWLNGKEYKCKVSNKGLPSSIEKTISKAKGQPREPQVYTLPPSQEEMTKNQVSLTCLVKGFYPSDIAVEWESNGQPENNYKTTPPVLDSDGSFFLYSRLTVDKSRWQEGNVFSCSVMHEALHNHYTQKSLSLSLGGGGSGSAHPIPDSSPLLQFGGQVRQRYLYTDDACQTEAHLEIREDGTVGGAADQSPESLLQLKALKPGVIQILGVKTSRFLCQRPDGALYGSLHFDPEACSFRELLLEDGYNVYQSEAHGLPLHLCGNKSPHRDPAPRGPARFLPLPGLPPAPPEPPGILAPQPPDVGSSDPLSMVGSQGRSPSYAS

SEQ ID NO: 29 - protein, 474 aa, Artificial Sequence
  Fusion Protein
HGEGTFTSDLSILLDEEAVREFIEWLLATGPVSGAPPPSGGGGGGGSGGGGSGGGGSAESKYGPPCPPCPAPEFEGGPSVFLFPPKPKDTLMISRTPEVTCVVVDVSQEDPEVQFNWYVDGVEVHNAKTKPREEQFNSTYRVVSVLTVLHQDWLNGKEYKCKVSNKGLPSSIEKTISKAKGQPREPQVYTLPPSQEEMTKNQVSLTCLVKGFYPSDIAVEWESNGQPENNYKTTPPVLDSDGSFFLYSRLTVDKSRWQEGNVFSCSVMHEALHNHYTQKSLSLSLGGGGSGSAHPIPDSSPLLQFGGQVRQRYLYTDDACQTEAHLEIREDGTVGGAADQSPESLLQLKALKPGVIQILGVKTSRFLCQRPDGALYGSLHFDPEACSFRELLLEDGYNVYQSEAHGLPLHLCGNKSPHRDPAPRGPARFLPLPGLPPAPPEPPGILAPQPPDVGSSDPLSMVYPSQGRSPSYAS

SEQ ID NO: 30 - protein, 473 aa, Artificial Sequence
  Fusion Protein
HGEGTFTSDLSILLDEEAVREFIEWLLATGPVSGAPPPSGGGGGGGSGGGGSGGGGSAESKYGPPCPPCPAPEFEGGPSVFLFPPKPKDTLMISRTPEVTCVVVDVSQEDPEVQFNWYVDGVEVHNAKTKPREEQFNSTYRVVSVLTVLHQDWLNGKEYKCKVSNKGLPSSIEKTISKAKGQPREPQVYTLPPSQEEMTKNQVSLTCLVKGFYPSDIAVEWESNGQPENNYKTTPPVLDSDGSFFLYSRLTVDKSRWQEGNVFSCSVMHEALHNHYTQKSLSLSLGGGGSGSAHPIPDSSPLLQFGGQVRQRYLYTDDACQTEAHLEIREDGTVGGAADQSPESLLQLKALKPGVIQILGVKTSRFLCQRPDGALYGSLHFDPEACSFRELLLEDGYNVYQSEAHGLPLHLPGCKSPHRDPAPRGPARFLPLPGLPPAPPEPPGILAPQPPDVGSSDPLSMVGSQGRSPSYAS

SEQ ID NO: 31 - protein, 474 aa, Artificial Sequence
  Fusion Protein
HGEGTFTSDLSILLDEEAVREFIEWLLATGPVSGAPPPSGGGGGGGSGGGGSGGGGSAESKYGPPCPPCPAPEFEGGPSVFLFPPKPKDTLMISRTPEVTCVVVDVSQEDPEVQFNWYVDGVEVHNAKTKPREEQFNSTYRVVSVLTVLHQDWLNGKEYKCKVSNKGLPSSIEKTISKAKGQPREPQVYTLPPSQEEMTKNQVSLTCLVKGFYPSDIAVEWESNGQPENNYKTTPPVLDSDGSFFLYSRLTVDKSRWQEGNVFSCSVMHEALHNHYTQKSLSLSLGGGGSGSAHPIPDSSPLLQFGGQVRQRYLYTDDACQTEAHLEIREDGTVGGAADQSPESLLQLKALKPGVIQILGVKTSRFLCQRPDGALYGSLHFDPEACSFRELLLEDGYNVYQSEAHGLPLHLPGCKSPHRDPAPRGPARFLPLPGLPPAPPEPPGILAPQPPDVGSSDPLSMVYPSQGRSPSYAS

SEQ ID NO: 32 - protein, 472 aa, Artificial Sequence
  Fusion Protein
HGEGTFTSDLSKQMEEEAVRLFIEWLKNGGPSSGAPPPSGGGGGGGSGGGGSGGGGSADKTHTCPPCPAPEAAGGPSVFLFPPKPKDTLMISRTPEVTCVVVDVSHEDPEVKFNWYVDGVEVHNAKTKPREEQYNSTYRVVSVLTVLHQDWLNGKEYKCKVSNKALPAPIEKTISKAKGQPREPQVYTLPPSRDELTKNQVSLTCLVKGFYPSDIAVEWESNGQPENNYKTTPPVLDSDGSFFLYSKLTVDKSRWQQGNVFSCSVMHEALHNHYTQKSLSLSPGGGGSGSAHPIPDSSPLLQFGGQVRQRYLYTDDACQTEAHLEIREDGTVGGAADQSPESLLQLKALKPGVIQILGVKTSRFLCQRPDGALYGSLHFDPEACSFRELLLEDGYNVYQSEAHGLPLHLPGCKSPHRDPAPRGPARFLPLPGLPPAPPEPPGILAPQPPDVGSSDPLSMVYPSQGRSPSYAS

SEQ ID NO: 33 - protein, 471 aa, Artificial Sequence
  Fusion Protein
HGEGTFTSDLSKQLEEERVQLFIEWLKATGPSSGAPPPSGGGGGGGSGGGGSGGGGSADKTHTCPPCPAPEAAGGPSVFLFPPKPKDTLMISRTPEVTCVVVDVSHEDPEVKFNWYVDGVEVHNAKTKPREEQYNSTYRVVSVLTVLHQDWLNGKEYKCKVSNKALPAPIEKTISKAKGQPREPQVYTLPPSRDELTKNQVSLTCLVKGFYPSDIAVEWESNGQPENNYKTTPPVLDSDGSFFLYSKLTVDKSRWQQGNVFSCSVMHEALHNHYTQKSLSLSPGGGGSGSAHPIPDSSPLLQFGGQVRQRYLYTDDACQTEAHLEIREDGTVGGAADQSPESLLQLKALKPGVIQILGVKTSRFLCQRPDGALYGSLHFDPEACSFRELLLEDGYNVYQSEAHGLPLHLCGNKSPHRDPAPRGPARFLPLPGLPPAPPEPPGILAPQPPDVGSSDPLSMVGSQGRSPSYAS

SEQ ID NO: 34 - protein, 472 aa, Artificial Sequence
  Fusion Protein
HGEGTFTSDLSKQLEEERVQLFIEWLKATGPSSGAPPPSGGGGGGGSGGGGSGGGGSADKTHTCPPCPAPEAAGGPSVFLFPPKPKDTLMISRTPEVTCVVVDVSHEDPEVKFNWYVDGVEVHNAKTKPREEQYNSTYRVVSVLTVLHQDWLNGKEYKCKVSNKALPAPIEKTISKAKGQPREPQVYTLPPSRDELTKNQVSLTCLVKGFYPSDIAVEWESNGQPENNYKTTPPVLDSDGSFFLYSKLTVDKSRWQQGNVFSCSVMHEALHNHYTQKSLSLSPGGGGSGSAHPIPDSSPLLQFGGQVRQRYLYTDDACQTEAHLEIREDGTVGGAADQSPESLLQLKALKPGVIQILGVKTSRFLCQRPDGALYGSLHFDPEACSFRELLLEDGYNVYQSEAHGLPLHLCGNKSPHRDPAPRGPARFLPLPGLPPAPPEPPGILAPQPPDVGSSDPLSMVYPSQGRSPSYAS

SEQ ID NO: 35 - protein, 471 aa, Artificial Sequence
  Fusion Protein
HGEGTFTSDLSKQLEEERVQEFIEWLKAGGPSSGAPPPSGGGGGGGSGGGGSGGGGSADKTHTCPPCPAPEAAGGPSVFLFPPKPKDTLMISRTPEVTCVVVDVSHEDPEVKFNWYVDGVEVHNAKTKPREEQYNSTYRVVSVLTVLHQDWLNGKEYKCKVSNKALPAPIEKTISKAKGQPREPQVYTLPPSRDELTKNQVSLTCLVKGFYPSDIAVEWESNGQPENNYKTTPPVLDSDGSFFLYSKLTVDKSRWQQGNVFSCSVMHEALHNHYTQKSLSLSPGGGGSGSAHPIPDSSPLLQFGGQVRQRYLYTDDACQTEAHLEIREDGTVGGAADQSPESLLQLKALKPGVIQILGVKTSRFLCQRPDGALYGSLHFDPEACSFRELLLEDGYNVYQSEAHGLPLHLCGNKSPHRDPAPRGPARFLPLPGLPPAPPEPPGILAPQPPDVGSSDPLSMVGSQGRSPSYAS

SEQ ID NO: 36 - protein, 472 aa, Artificial Sequence
  Fusion Protein
HGEGTFTSDLSKQLEEERVQEFIEWLKAGGPSSGAPPPSGGGGGGGSGGGGSGGGGSADKTHTCPPCPAPEAAGGPSVFLFPPKPKDTLMISRTPEVTCVVVDVSHEDPEVKFNWYVDGVEVHNAKTKPREEQYNSTYRVVSVLTVLHQDWLNGKEYKCKVSNKALPAPIEKTISKAKGQPREPQVYTLPPSRDELTKNQVSLTCLVKGFYPSDIAVEWESNGQPENNYKTTPPVLDSDGSFFLYSKLTVDKSRWQQGNVFSCSVMHEALHNHYTQKSLSLSPGGGGSGSAHPIPDSSPLLQFGGQVRQRYLYTDDACQTEAHLEIREDGTVGGAADQSPESLLQLKALKPGVIQILGVKTSRFLCQRPDGALYGSLHFDPEACSFRELLLEDGYNVYQSEAHGLPLHLCGNKSPHRDPAPRGPARFLPLPGLPPAPPEPPGILAPQPPDVGSSDPLSMVYPSQGRSPSYAS

SEQ ID NO: 37 - protein, 471 aa, Artificial Sequence
  Fusion Protein
HGEGTFTSDLSKQLEEERVQEFIEWLKAGGPSSGAPPPSGGGGGGGSGGGGSGGGGSADKTHTCPPCPAPEAAGGPSVFLFPPKPKDTLMISRTPEVTCVVVDVSHEDPEVKFNWYVDGVEVHNAKTKPREEQYNSTYRVVSVLTVLHQDWLNGKEYKCKVSNKALPAPIEKTISKAKGQPREPQVYTLPPSRDELTKNQVSLTCLVKGFYPSDIAVEWESNGQPENNYKTTPPVLDSDGSFFLYSKLTVDKSRWQQGNVFSCSVMHEALHNHYTQKSLSLSPGGGGSGSAHPIPDSSPLLQFGGQVRQRYLYTDDACQTEAHLEIREDGTVGGAADQSPESLLQLKALKPGVIQILGVKTSRFLCQRPDGALYGSLHFDPEACSFRELLLEDGYNVYQSEAHGLPLHLPGCKSPHRDPAPRGPARFLPLPGLPPAPPEPPGILAPQPPDVGSSDPLSMVGSQGRSPSYAS

SEQ ID NO: 38 - protein, 471 aa, Artificial Sequence
  Fusion Protein
HGEGTFTSDLSKQLEEEAVQLFIEWLLATGPSSGAPPPSGGGGGGGSGGGGSGGGGSADKTHTCPPCPAPEAAGGPSVFLFPPKPKDTLMISRTPEVTCVVVDVSHEDPEVKFNWYVDGVEVHNAKTKPREEQYNSTYRVVSVLTVLHQDWLNGKEYKCKVSNKALPAPIEKTISKAKGQPREPQVYTLPPSRDELTKNQVSLTCLVKGFYPSDIAVEWESNGQPENNYKTTPPVLDSDGSFFLYSKLTVDKSRWQQGNVFSCSVMHEALHNHYTQKSLSLSPGGGGSGSAHPIPDSSPLLQFGGQVRQRYLYTDDACQTEAHLEIREDGTVGGAADQSPESLLQLKALKPGVIQILGVKTSRFLCQRPDGALYGSLHFDPEACSFRELLLEDGYNVYQSEAHGLPLHLPGCKSPHRDPAPRGPARFLPLPGLPPAPPEPPGILAPQPPDVGSSDPLSMVGSQGRSPSYAS

SEQ ID NO: 39 - protein, 471 aa, Artificial Sequence
  Fusion Protein
HGEGTFTSDLSIQLEEEAVQEFIEWLLATGPSSGAPPPSGGGGGGGSGGGGSGGGGSADKTHTCPPCPAPEAAGGPSVFLFPPKPKDTLMISRTPEVTCVVVDVSHEDPEVKFNWYVDGVEVHNAKTKPREEQYNSTYRVVSVLTVLHQDWLNGKEYKCKVSNKALPAPIEKTISKAKGQPREPQVYTLPPSRDELTKNQVSLTCLVKGFYPSDIAVEWESNGQPENNYKTTPPVLDSDGSFFLYSKLTVDKSRWQQGNVFSCSVMHEALHNHYTQKSLSLSPGGGGSGSAHPIPDSSPLLQFGGQVRQRYLYTDDACQTEAHLEIREDGTVGGAADQSPESLLQLKALKPGVIQILGVKTSRFLCQRPDGALYGSLHFDPEACSFRELLLEDGYNVYQSEAHGLPLHLPGCKSPHRDPAPRGPARFLPLPGLPPAPPEPPGILAPQPPDVGSSDPLSMVGSQGRSPSYAS

SEQ ID NO: 40 - protein, 472 aa, Artificial Sequence
  Fusion Protein
GHGEGTFTSDLSIQLEEEAVRLFIEWLLAGGPSSGAPPPSGGGGGGGSGGGGSGGGGSADKTHTCPPCPAPEAAGGPSVFLFPPKPKDTLMISRTPEVTCVVVDVSHEDPEVKFNWYVDGVEVHNAKTKPREEQYNSTYRVVSVLTVLHQDWLNGKEYKCKVSNKALPAPIEKTISKAKGQPREPQVYTLPPSRDELTKNQVSLTCLVKGFYPSDIAVEWESNGQPENNYKTTPPVLDSDGSFFLYSKLTVDKSRWQQGNVFSCSVMHEALHNHYTQKSLSLSPGGGGSGSAHPIPDSSPLLQFGGQVRQRYLYTDDACQTEAHLEIREDGTVGGAADQSPESLLQLKALKPGVIQILGVKTSRFLCQRPDGALYGSLHFDPEACSFRELLLEDGYNVYQSEAHGLPLHLPGCKSPHRDPAPRGPARFLPLPGLPPAPPEPPGILAPQPPDVGSSDPLSMVGSQGRSPSYAS

SEQ ID NO: 41 - protein, 472 aa, Artificial Sequence
  Fusion Protein
GHGEGTFTSDLSIQLEEEAVRLFIEWLLATGPSSGAPPPSGGGGGGGSGGGGSGGGGSADKTHTCPPCPAPEAAGGPSVFLFPPKPKDTLMISRTPEVTCVVVDVSHEDPEVKFNWYVDGVEVHNAKTKPREEQYNSTYRVVSVLTVLHQDWLNGKEYKCKVSNKALPAPIEKTISKAKGQPREPQVYTLPPSRDELTKNQVSLTCLVKGFYPSDIAVEWESNGQPENNYKTTPPVLDSDGSFFLYSKLTVDKSRWQQGNVFSCSVMHEALHNHYTQKSLSLSPGGGGSGSAHPIPDSSPLLQFGGQVRQRYLYTDDACQTEAHLEIREDGTVGGAADQSPESLLQLKALKPGVIQILGVKTSRFLCQRPDGALYGSLHFDPEACSFRELLLEDGYNVYQSEAHGLPLHLPGCKSPHRDPAPRGPARFLPLPGLPPAPPEPPGILAPQPPDVGSSDPLSMVGSQGRSPSYAS

SEQ ID NO: 42 - protein, 471 aa, Artificial Sequence
  Fusion Protein
HGEGTFTSDLSIQLDEEAVRLFIEWLLATGPVSGAPPPSGGGGGGGSGGGGSGGGGSADKTHTCPPCPAPEAAGGPSVFLFPPKPKDTLMISRTPEVTCVVVDVSHEDPEVKFNWYVDGVEVHNAKTKPREEQYNSTYRVVSVLTVLHQDWLNGKEYKCKVSNKALPAPIEKTISKAKGQPREPQVYTLPPSRDELTKNQVSLTCLVKGFYPSDIAVEWESNGQPENNYKTTPPVLDSDGSFFLYSKLTVDKSRWQQGNVFSCSVMHEALHNHYTQKSLSLSPGGGGSGSAHPIPDSSPLLQFGGQVRQRYLYTDDACQTEAHLEIREDGTVGGAADQSPESLLQLKALKPGVIQILGVKTSRFLCQRPDGALYGSLHFDPEACSFRELLLEDGYNVYQSEAHGLPLHLPGCKSPHRDPAPRGPARFLPLPGLPPAPPEPPGILAPQPPDVGSSDPLSMVGSQGRSPSYAS

SEQ ID NO: 43 - protein, 471 aa, Artificial Sequence
  Fusion Protein
HGEGTFTSDLSILLDEEAVRLFIEWLLATGPVSGAPPPSGGGGGGGSGGGGSGGGGSADKTHTCPPCPAPEAAGGPSVFLFPPKPKDTLMISRTPEVTCVVVDVSHEDPEVKFNWYVDGVEVHNAKTKPREEQYNSTYRVVSVLTVLHQDWLNGKEYKCKVSNKALPAPIEKTISKAKGQPREPQVYTLPPSRDELTKNQVSLTCLVKGFYPSDIAVEWESNGQPENNYKTTPPVLDSDGSFFLYSKLTVDKSRWQQGNVFSCSVMHEALHNHYTQKSLSLSPGGGGSGSAHPIPDSSPLLQFGGQVRQRYLYTDDACQTEAHLEIREDGTVGGAADQSPESLLQLKALKPGVIQILGVKTSRFLCQRPDGALYGSLHFDPEACSFRELLLEDGYNVYQSEAHGLPLHLPGCKSPHRDPAPRGPARFLPLPGLPPAPPEPPGILAPQPPDVGSSDPLSMVGSQGRSPSYAS

SEQ ID NO: 44 - protein, 471 aa, Artificial Sequence
  Fusion Protein
HGEGTFTSDLSIQLDEEAVRLFIEWLEATGPVSGAPPPSGGGGGGGSGGGGSGGGGSADKTHTCPPCPAPEAAGGPSVFLFPPKPKDTLMISRTPEVTCVVVDVSHEDPEVKFNWYVDGVEVHNAKTKPREEQYNSTYRVVSVLTVLHQDWLNGKEYKCKVSNKALPAPIEKTISKAKGQPREPQVYTLPPSRDELTKNQVSLTCLVKGFYPSDIAVEWESNGQPENNYKTTPPVLDSDGSFFLYSKLTVDKSRWQQGNVFSCSVMHEALHNHYTQKSLSLSPGGGGSGSAHPIPDSSPLLQFGGQVRQRYLYTDDACQTEAHLEIREDGTVGGAADQSPESLLQLKALKPGVIQILGVKTSRFLCQRPDGALYGSLHFDPEACSFRELLLEDGYNVYQSEAHGLPLHLPGCKSPHRDPAPRGPARFLPLPGLPPAPPEPPGILAPQPPDVGSSDPLSMVGSQGRSPSYAS

SEQ ID NO: 45 - protein, 472 aa, Artificial Sequence
  Fusion Protein
HGEGTFTSDLSIQLDEEAVRLFIEWLEATGPVSGAPPPSGGGGGGGSGGGGSGGGGSADKTHTCPPCPAPEAAGGPSVFLFPPKPKDTLMISRTPEVTCVVVDVSHEDPEVKFNWYVDGVEVHNAKTKPREEQYNSTYRVVSVLTVLHQDWLNGKEYKCKVSNKALPAPIEKTISKAKGQPREPQVYTLPPSRDELTKNQVSLTCLVKGFYPSDIAVEWESNGQPENNYKTTPPVLDSDGSFFLYSKLTVDKSRWQQGNVFSCSVMHEALHNHYTQKSLSLSPGGGGSGSAHPIPDSSPLLQFGGQVRQRYLYTDDACQTEAHLEIREDGTVGGAADQSPESLLQLKALKPGVIQILGVKTSRFLCQRPDGALYGSLHFDPEACSFRELLLEDGYNVYQSEAHGLPLHLPGCKSPHRDPAPRGPARFLPLPGLPPAPPEPPGILAPQPPDVGSSDPLSMVYPSQGRSPSYAS

SEQ ID NO: 46 - protein, 471 aa, Artificial Sequence
  Fusion Protein
HGEGTFTSDLSILLDEEAVREFIEWLLATGPVSGAPPPSGGGGGGGSGGGGSGGGGSADKTHTCPPCPAPEAAGGPSVFLFPPKPKDTLMISRTPEVTCVVVDVSHEDPEVKFNWYVDGVEVHNAKTKPREEQYNSTYRVVSVLTVLHQDWLNGKEYKCKVSNKALPAPIEKTISKAKGQPREPQVYTLPPSRDELTKNQVSLTCLVKGFYPSDIAVEWESNGQPENNYKTTPPVLDSDGSFFLYSKLTVDKSRWQQGNVFSCSVMHEALHNHYTQKSLSLSPGGGGSGSAHPIPDSSPLLQFGGQVRQRYLYTDDACQTEAHLEIREDGTVGGAADQSPESLLQLKALKPGVIQILGVKTSRFLCQRPDGALYGSLHFDPEACSFRELLLEDGYNVYQSEAHGLPLHLPGCKSPHRDPAPRGPARFLPLPGLPPAPPEPPGILAPQPPDVGSSDPLSMVGSQGRSPSYAS

SEQ ID NO: 47 - protein, 475 aa, Artificial Sequence
  Fusion Protein
HGEGTFTSDLSKQLEEEAVQLFIEWLLATGPSSGKPPPKSGGGGGGGSGGGGSGGGGSAESKYGPPCPPCPAPEFEGGPSVFLFPPKPKDTLMISRTPEVTCVVVDVSQEDPEVQFNWYVDGVEVHNAKTKPREEQFNSTYRVVSVLTVLHQDWLNGKEYKCKVSNKGLPSSIEKTISKAKGQPREPQVYTLPPSQEEMTKNQVSLTCLVKGFYPSDIAVEWESNGQPENNYKTTPPVLDSDGSFFLYSRLTVDKSRWQEGNVFSCSVMHEALHNHYTQKSLSLSLGGGGSGSAHPIPDSSPLLQFGGQVRQRYLYTDDACQTEAHLEIREDGTVGGAADQSPESLLQLKALKPGVIQILGVKTSRFLCQRPDGALYGSLHFDPEACSFRELLLEDGYNVYQSEAHGLPLHLPGCKSPHRDPAPRGPARFLPLPGLPPAPPEPPGILAPQPPDVGSSDPLSMVYPSQGRSPSYAS

SEQ ID NO: 48 - protein, 475 aa, Artificial Sequence
  Fusion Protein
HGEGTFTSDLSKQLEEEAVQLFIEWLLATGPSSGKPPPESGGGGGGGSGGGGSGGGGSAESKYGPPCPPCPAPEFEGGPSVFLFPPKPKDTLMISRTPEVTCVVVDVSQEDPEVQFNWYVDGVEVHNAKTKPREEQFNSTYRVVSVLTVLHQDWLNGKEYKCKVSNKGLPSSIEKTISKAKGQPREPQVYTLPPSQEEMTKNQVSLTCLVKGFYPSDIAVEWESNGQPENNYKTTPPVLDSDGSFFLYSRLTVDKSRWQEGNVFSCSVMHEALHNHYTQKSLSLSLGGGGSGSAHPIPDSSPLLQFGGQVRQRYLYTDDACQTEAHLEIREDGTVGGAADQSPESLLQLKALKPGVIQILGVKTSRFLCQRPDGALYGSLHFDPEACSFRELLLEDGYNVYQSEAHGLPLHLPGCKSPHRDPAPRGPARFLPLPGLPPAPPEPPGILAPQPPDVGSSDPLSMVYPSQGRSPSYAS

SEQ ID NO: 49 - protein, 475 aa, Artificial Sequence
  Fusion Protein
HGEGTFTSDLSKQLEEEAVQLFIEWLLATGPSSGEPPPKSGGGGGGGSGGGGSGGGGSAESKYGPPCPPCPAPEFEGGPSVFLFPPKPKDTLMISRTPEVTCVVVDVSQEDPEVQFNWYVDGVEVHNAKTKPREEQFNSTYRVVSVLTVLHQDWLNGKEYKCKVSNKGLPSSIEKTISKAKGQPREPQVYTLPPSQEEMTKNQVSLTCLVKGFYPSDIAVEWESNGQPENNYKTTPPVLDSDGSFFLYSRLTVDKSRWQEGNVFSCSVMHEALHNHYTQKSLSLSLGGGGSGSAHPIPDSSPLLQFGGQVRQRYLYTDDACQTEAHLEIREDGTVGGAADQSPESLLQLKALKPGVIQILGVKTSRFLCQRPDGALYGSLHFDPEACSFRELLLEDGYNVYQSEAHGLPLHLPGCKSPHRDPAPRGPARFLPLPGLPPAPPEPPGILAPQPPDVGSSDPLSMVYPSQGRSPSYAS

SEQ ID NO: 50 - protein, 474 aa, Artificial Sequence
  Fusion Protein
HGEGTFTSDLSKQLEEEAVQLFIEWLLATGPSSGKPPPKGGGGGGGSGGGGSGGGGSAESKYGPPCPPCPAPEFEGGPSVFLFPPKPKDTLMISRTPEVTCVVVDVSQEDPEVQFNWYVDGVEVHNAKTKPREEQFNSTYRVVSVLTVLHQDWLNGKEYKCKVSNKGLPSSIEKTISKAKGQPREPQVYTLPPSQEEMTKNQVSLTCLVKGFYPSDIAVEWESNGQPENNYKTTPPVLDSDGSFFLYSRLTVDKSRWQEGNVFSCSVMHEALHNHYTQKSLSLSLGGGGSGSAHPIPDSSPLLQFGGQVRQRYLYTDDACQTEAHLEIREDGTVGGAADQSPESLLQLKALKPGVIQILGVKTSRFLCQRPDGALYGSLHFDPEACSFRELLLEDGYNVYQSEAHGLPLHLPGCKSPHRDPAPRGPARFLPLPGLPPAPPEPPGILAPQPPDVGSSDPLSMVYPSQGRSPSYAS

SEQ ID NO: 51 - protein, 474 aa, Artificial Sequence
  Fusion Protein
HGEGTFTSDLSKQLEEEAVQLFIEWLLATGPSSGKPPPEGGGGGGGSGGGGSGGGGSAESKYGPPCPPCPAPEFEGGPSVFLFPPKPKDTLMISRTPEVTCVVVDVSQEDPEVQFNWYVDGVEVHNAKTKPREEQFNSTYRVVSVLTVLHQDWLNGKEYKCKVSNKGLPSSIEKTISKAKGQPREPQVYTLPPSQEEMTKNQVSLTCLVKGFYPSDIAVEWESNGQPENNYKTTPPVLDSDGSFFLYSRLTVDKSRWQEGNVFSCSVMHEALHNHYTQKSLSLSLGGGGSGSAHPIPDSSPLLQFGGQVRQRYLYTDDACQTEAHLEIREDGTVGGAADQSPESLLQLKALKPGVIQILGVKTSRFLCQRPDGALYGSLHFDPEACSFRELLLEDGYNVYQSEAHGLPLHLPGCKSPHRDPAPRGPARFLPLPGLPPAPPEPPGILAPQPPDVGSSDPLSMVYPSQGRSPSYAS

SEQ ID NO: 52 - protein, 474 aa, Artificial Sequence
  Fusion Protein
HGEGTFTSDLSKQLEEEAVQLFIEWLLATGPSSGEPPPKGGGGGGGSGGGGSGGGGSAESKYGPPCPPCPAPEFEGGPSVFLFPPKPKDTLMISRTPEVTCVVVDVSQEDPEVQFNWYVDGVEVHNAKTKPREEQFNSTYRVVSVLTVLHQDWLNGKEYKCKVSNKGLPSSIEKTISKAKGQPREPQVYTLPPSQEEMTKNQVSLTCLVKGFYPSDIAVEWESNGQPENNYKTTPPVLDSDGSFFLYSRLTVDKSRWQEGNVFSCSVMHEALHNHYTQKSLSLSLGGGGSGSAHPIPDSSPLLQFGGQVRQRYLYTDDACQTEAHLEIREDGTVGGAADQSPESLLQLKALKPGVIQILGVKTSRFLCQRPDGALYGSLHFDPEACSFRELLLEDGYNVYQSEAHGLPLHLPGCKSPHRDPAPRGPARFLPLPGLPPAPPEPPGILAPQPPDVGSSDPLSMVYPSQGRSPSYAS

SEQ ID NO: 53 - protein, 473 aa, Artificial Sequence
  Fusion Protein
HGEGTFTSDKSKQLDEQRAKEFIEWLKAGGHPSGKPPPKGGGGGGGSGGGGSGGGGSAESKYGPPCPPCPAPEFEGGPSVFLFPPKPKDTLMISRTPEVTCVVVDVSQEDPEVQFNWYVDGVEVHNAKTKPREEQFNSTYRVVSVLTVLHQDWLNGKEYKCKVSNKGLPSSIEKTISKAKGQPREPQVYTLPPSQEEMTKNQVSLTCLVKGFYPSDIAVEWESNGQPENNYKTTPPVLDSDGSFFLYSRLTVDKSRWQEGNVFSCSVMHEALHNHYTQKSLSLSLGGGGSGSAHPIPDSSPLLQFGGQVRQRYLYTDDACQTEAHLEIREDGTVGGAADQSPESLLQLKALKPGVIQILGVKTSRFLCQRPDGALYGSLHFDPEACSFRELLLEDGYNVYQSEAHGLPLHLPGCKSPHRDPAPRGPARFLPLPGLPPAPPEPPGILAPQPPDVGSSDPLSMVGSQGRSPSYAS

SEQ ID NO: 54 - protein, 474 aa, Artificial Sequence
  Fusion Protein
GHGEGTFTSDKSKQLEEEAVRLFIEWLKAGGHPSGKPPPKGGGGGGGSGGGGSGGGGSAESKYGPPCPPCPAPEFEGGPSVFLFPPKPKDTLMISRTPEVTCVVVDVSQEDPEVQFNWYVDGVEVHNAKTKPREEQFNSTYRVVSVLTVLHQDWLNGKEYKCKVSNKGLPSSIEKTISKAKGQPREPQVYTLPPSQEEMTKNQVSLTCLVKGFYPSDIAVEWESNGQPENNYKTTPPVLDSDGSFFLYSRLTVDKSRWQEGNVFSCSVMHEALHNHYTQKSLSLSLGGGGSGSAHPIPDSSPLLQFGGQVRQRYLYTDDACQTEAHLEIREDGTVGGAADQSPESLLQLKALKPGVIQILGVKTSRFLCQRPDGALYGSLHFDPEACSFRELLLEDGYNVYQSEAHGLPLHLPGCKSPHRDPAPRGPARFLPLPGLPPAPPEPPGILAPQPPDVGSSDPLSMVGSQGRSPSYAS

SEQ ID NO: 55 - protein, 474 aa, Artificial Sequence
  Fusion Protein
GHGEGTFTSDKSIQLEEEAVRLFIEWLLAGGHPSGKPPPKGGGGGGGSGGGGSGGGGSAESKYGPPCPPCPAPEFEGGPSVFLFPPKPKDTLMISRTPEVTCVVVDVSQEDPEVQFNWYVDGVEVHNAKTKPREEQFNSTYRVVSVLTVLHQDWLNGKEYKCKVSNKGLPSSIEKTISKAKGQPREPQVYTLPPSQEEMTKNQVSLTCLVKGFYPSDIAVEWESNGQPENNYKTTPPVLDSDGSFFLYSRLTVDKSRWQEGNVFSCSVMHEALHNHYTQKSLSLSLGGGGSGSAHPIPDSSPLLQFGGQVRQRYLYTDDACQTEAHLEIREDGTVGGAADQSPESLLQLKALKPGVIQILGVKTSRFLCQRPDGALYGSLHFDPEACSFRELLLEDGYNVYQSEAHGLPLHLPGCKSPHRDPAPRGPARFLPLPGLPPAPPEPPGILAPQPPDVGSSDPLSMVGSQGRSPSYAS

SEQ ID NO: 56 - protein, 474 aa, Artificial Sequence
  Fusion Protein
AHGEGTFTSDKSIQLEKEAVRLFIEWLLAGGHPSGKPPPKGGGGGGGSGGGGSGGGGSAESKYGPPCPPCPAPEFEGGPSVFLFPPKPKDTLMISRTPEVTCVVVDVSQEDPEVQFNWYVDGVEVHNAKTKPREEQFNSTYRVVSVLTVLHQDWLNGKEYKCKVSNKGLPSSIEKTISKAKGQPREPQVYTLPPSQEEMTKNQVSLTCLVKGFYPSDIAVEWESNGQPENNYKTTPPVLDSDGSFFLYSRLTVDKSRWQEGNVFSCSVMHEALHNHYTQKSLSLSLGGGGSGSAHPIPDSSPLLQFGGQVRQRYLYTDDACQTEAHLEIREDGTVGGAADQSPESLLQLKALKPGVIQILGVKTSRFLCQRPDGALYGSLHFDPEACSFRELLLEDGYNVYQSEAHGLPLHLPGCKSPHRDPAPRGPARFLPLPGLPPAPPEPPGILAPQPPDVGSSDPLSMVGSQGRSPSYAS

SEQ ID NO: 57 - protein, 473 aa, Artificial Sequence
  Fusion Protein
YGEGTFTSDKSQLLEKRLAHLFIEWLIAGGHSSGKPPPKGGGGGGGSGGGGSGGGGSAESKYGPPCPPCPAPEFEGGPSVFLFPPKPKDTLMISRTPEVTCVVVDVSQEDPEVQFNWYVDGVEVHNAKTKPREEQFNSTYRVVSVLTVLHQDWLNGKEYKCKVSNKGLPSSIEKTISKAKGQPREPQVYTLPPSQEEMTKNQVSLTCLVKGFYPSDIAVEWESNGQPENNYKTTPPVLDSDGSFFLYSRLTVDKSRWQEGNVFSCSVMHEALHNHYTQKSLSLSLGGGGSGSAHPIPDSSPLLQFGGQVRQRYLYTDDACQTEAHLEIREDGTVGGAADQSPESLLQLKALKPGVIQILGVKTSRFLCQRPDGALYGSLHFDPEACSFRELLLEDGYNVYQSEAHGLPLHLPGCKSPHRDPAPRGPARFLPLPGLPPAPPEPPGILAPQPPDVGSSDPLSMVGSQGRSPSYAS

SEQ ID NO: 58 - protein, 473 aa, Artificial Sequence
  Fusion Protein
YGEGTFTSDKSKLLEKRLVRLFIEWLIAGGHSSGKPPPKGGGGGGGSGGGGSGGGGSAESKYGPPCPPCPAPEFEGGPSVFLFPPKPKDTLMISRTPEVTCVVVDVSQEDPEVQFNWYVDGVEVHNAKTKPREEQFNSTYRVVSVLTVLHQDWLNGKEYKCKVSNKGLPSSIEKTISKAKGQPREPQVYTLPPSQEEMTKNQVSLTCLVKGFYPSDIAVEWESNGQPENNYKTTPPVLDSDGSFFLYSRLTVDKSRWQEGNVFSCSVMHEALHNHYTQKSLSLSLGGGGSGSAHPIPDSSPLLQFGGQVRQRYLYTDDACQTEAHLEIREDGTVGGAADQSPESLLQLKALKPGVIQILGVKTSRFLCQRPDGALYGSLHFDPEACSFRELLLEDGYNVYQSEAHGLPLHLPGCKSPHRDPAPRGPARFLPLPGLPPAPPEPPGILAPQPPDVGSSDPLSMVGSQGRSPSYAS

SEQ ID NO: 59 - protein, 473 aa, Artificial Sequence
  Fusion Protein
YGEGTFTSDKSKLLEKRLAHLFIEWLIAGGHSSGKPPPKGGGGGGGSGGGGSGGGGSAESKYGPPCPPCPAPEFEGGPSVFLFPPKPKDTLMISRTPEVTCVVVDVSQEDPEVQFNWYVDGVEVHNAKTKPREEQFNSTYRVVSVLTVLHQDWLNGKEYKCKVSNKGLPSSIEKTISKAKGQPREPQVYTLPPSQEEMTKNQVSLTCLVKGFYPSDIAVEWESNGQPENNYKTTPPVLDSDGSFFLYSRLTVDKSRWQEGNVFSCSVMHEALHNHYTQKSLSLSLGGGGSGSAHPIPDSSPLLQFGGQVRQRYLYTDDACQTEAHLEIREDGTVGGAADQSPESLLQLKALKPGVIQILGVKTSRFLCQRPDGALYGSLHFDPEACSFRELLLEDGYNVYQSEAHGLPLHLPGCKSPHRDPAPRGPARFLPLPGLPPAPPEPPGILAPQPPDVGSSDPLSMVGSQGRSPSYAS

SEQ ID NO: 60 - protein, 473 aa, Artificial Sequence
  Fusion Protein
YGEGTFTSDKSKQLEKRLVRLFIEWLIAGGHSSGKPPPKGGGGGGGSGGGGSGGGGSAESKYGPPCPPCPAPEFEGGPSVFLFPPKPKDTLMISRTPEVTCVVVDVSQEDPEVQFNWYVDGVEVHNAKTKPREEQFNSTYRVVSVLTVLHQDWLNGKEYKCKVSNKGLPSSIEKTISKAKGQPREPQVYTLPPSQEEMTKNQVSLTCLVKGFYPSDIAVEWESNGQPENNYKTTPPVLDSDGSFFLYSRLTVDKSRWQEGNVFSCSVMHEALHNHYTQKSLSLSLGGGGSGSAHPIPDSSPLLQFGGQVRQRYLYTDDACQTEAHLEIREDGTVGGAADQSPESLLQLKALKPGVIQILGVKTSRFLCQRPDGALYGSLHFDPEACSFRELLLEDGYNVYQSEAHGLPLHLPGCKSPHRDPAPRGPARFLPLPGLPPAPPEPPGILAPQPPDVGSSDPLSMVGSQGRSPSYAS

SEQ ID NO: 61 - protein, 473 aa, Artificial Sequence
  Fusion Protein
YGEGTFTSDKSKQLEKRLAHLFIEWLIAGGHSSGKPPPKGGGGGGGSGGGGSGGGGSAESKYGPPCPPCPAPEFEGGPSVFLFPPKPKDTLMISRTPEVTCVVVDVSQEDPEVQFNWYVDGVEVHNAKTKPREEQFNSTYRVVSVLTVLHQDWLNGKEYKCKVSNKGLPSSIEKTISKAKGQPREPQVYTLPPSQEEMTKNQVSLTCLVKGFYPSDIAVEWESNGQPENNYKTTPPVLDSDGSFFLYSRLTVDKSRWQEGNVFSCSVMHEALHNHYTQKSLSLSLGGGGSGSAHPIPDSSPLLQFGGQVRQRYLYTDDACQTEAHLEIREDGTVGGAADQSPESLLQLKALKPGVIQILGVKTSRFLCQRPDGALYGSLHFDPEACSFRELLLEDGYNVYQSEAHGLPLHLPGCKSPHRDPAPRGPARFLPLPGLPPAPPEPPGILAPQPPDVGSSDPLSMVGSQGRSPSYAS

SEQ ID NO: 62 - protein, 473 aa, Artificial Sequence
  Fusion Protein
YGEGTFTSDKSKQLEKRLVRLFIEWLIKGGHSSGKPPPKGGGGGGGSGGGGSGGGGSAESKYGPPCPPCPAPEFEGGPSVFLFPPKPKDTLMISRTPEVTCVVVDVSQEDPEVQFNWYVDGVEVHNAKTKPREEQFNSTYRVVSVLTVLHQDWLNGKEYKCKVSNKGLPSSIEKTISKAKGQPREPQVYTLPPSQEEMTKNQVSLTCLVKGFYPSDIAVEWESNGQPENNYKTTPPVLDSDGSFFLYSRLTVDKSRWQEGNVFSCSVMHEALHNHYTQKSLSLSLGGGGSGSAHPIPDSSPLLQFGGQVRQRYLYTDDACQTEAHLEIREDGTVGGAADQSPESLLQLKALKPGVIQILGVKTSRFLCQRPDGALYGSLHFDPEACSFRELLLEDGYNVYQSEAHGLPLHLPGCKSPHRDPAPRGPARFLPLPGLPPAPPEPPGILAPQPPDVGSSDPLSMVGSQGRSPSYAS

SEQ ID NO: 63 - protein, 473 aa, Artificial Sequence
  Fusion Protein
YGEGTFTSDKSKQLEKRLAHLFIEWLIKGGHSSGKPPPKGGGGGGGSGGGGSGGGGSAESKYGPPCPPCPAPEFEGGPSVFLFPPKPKDTLMISRTPEVTCVVVDVSQEDPEVQFNWYVDGVEVHNAKTKPREEQFNSTYRVVSVLTVLHQDWLNGKEYKCKVSNKGLPSSIEKTISKAKGQPREPQVYTLPPSQEEMTKNQVSLTCLVKGFYPSDIAVEWESNGQPENNYKTTPPVLDSDGSFFLYSRLTVDKSRWQEGNVFSCSVMHEALHNHYTQKSLSLSLGGGGSGSAHPIPDSSPLLQFGGQVRQRYLYTDDACQTEAHLEIREDGTVGGAADQSPESLLQLKALKPGVIQILGVKTSRFLCQRPDGALYGSLHFDPEACSFRELLLEDGYNVYQSEAHGLPLHLPGCKSPHRDPAPRGPARFLPLPGLPPAPPEPPGILAPQPPDVGSSDPLSMVGSQGRSPSYAS

SEQ ID NO: 64 - protein, 473 aa, Artificial Sequence
  Fusion Protein
HTEGTFTSDKSKQLEKRLVRLFIEWLIKGGHSSGKPPPKGGGGGGGSGGGGSGGGGSAESKYGPPCPPCPAPEFEGGPSVFLFPPKPKDTLMISRTPEVTCVVVDVSQEDPEVQFNWYVDGVEVHNAKTKPREEQFNSTYRVVSVLTVLHQDWLNGKEYKCKVSNKGLPSSIEKTISKAKGQPREPQVYTLPPSQEEMTKNQVSLTCLVKGFYPSDIAVEWESNGQPENNYKTTPPVLDSDGSFFLYSRLTVDKSRWQEGNVFSCSVMHEALHNHYTQKSLSLSLGGGGSGSAHPIPDSSPLLQFGGQVRQRYLYTDDACQTEAHLEIREDGTVGGAADQSPESLLQLKALKPGVIQILGVKTSRFLCQRPDGALYGSLHFDPEACSFRELLLEDGYNVYQSEAHGLPLHLPGCKSPHRDPAPRGPARFLPLPGLPPAPPEPPGILAPQPPDVGSSDPLSMVGSQGRSPSYAS

SEQ ID NO: 65 - protein, 473 aa, Artificial Sequence
  Fusion Protein
HGEGTFTSDKSKQLAKRLVRLFIEWLIKGGHSSGKPPPKGGGGGGGSGGGGSGGGGSAESKYGPPCPPCPAPEFEGGPSVFLFPPKPKDTLMISRTPEVTCVVVDVSQEDPEVQFNWYVDGVEVHNAKTKPREEQFNSTYRVVSVLTVLHQDWLNGKEYKCKVSNKGLPSSIEKTISKAKGQPREPQVYTLPPSQEEMTKNQVSLTCLVKGFYPSDIAVEWESNGQPENNYKTTPPVLDSDGSFFLYSRLTVDKSRWQEGNVFSCSVMHEALHNHYTQKSLSLSLGGGGSGSAHPIPDSSPLLQFGGQVRQRYLYTDDACQTEAHLEIREDGTVGGAADQSPESLLQLKALKPGVIQILGVKTSRFLCQRPDGALYGSLHFDPEACSFRELLLEDGYNVYQSEAHGLPLHLPGCKSPHRDPAPRGPARFLPLPGLPPAPPEPPGILAPQPPDVGSSDPLSMVGSQGRSPSYAS

SEQ ID NO: 66 - protein, 472 aa, Artificial Sequence
  Fusion Protein
GHGEGTFTSDKSKQLEEEAVRLFIEWLKAGGPKKQRLSGGGGGGGSGGGGSGGGGSAESKYGPPCPPCPAPEFEGGPSVFLFPPKPKDTLMISRTPEVTCVVVDVSQEDPEVQFNWYVDGVEVHNAKTKPREEQFNSTYRVVSVLTVLHQDWLNGKEYKCKVSNKGLPSSIEKTISKAKGQPREPQVYTLPPSQEEMTKNQVSLTCLVKGFYPSDIAVEWESNGQPENNYKTTPPVLDSDGSFFLYSRLTVDKSRWQEGNVFSCSVMHEALHNHYTQKSLSLSLGGGGSGSAHPIPDSSPLLQFGGQVRQRYLYTDDACQTEAHLEIREDGTVGGAADQSPESLLQLKALKPGVIQILGVKTSRFLCQRPDGALYGSLHFDPEACSFRELLLEDGYNVYQSEAHGLPLHLPGCKSPHRDPAPRGPARFLPLPGLPPAPPEPPGILAPQPPDVGSSDPLSMVGSQGRSPSYAS

SEQ ID NO: 67 - protein, 474 aa, Artificial Sequence
  Fusion Protein
GHGEGTFTSDLSIQLEEEAVRLFIEWLLAGGPSSGKPPPKGGGGGGGSGGGGSGGGGSAESKYGPPCPPCPAPEFEGGPSVFLFPPKPKDTLMISRTPEVTCVVVDVSQEDPEVQFNWYVDGVEVHNAKTKPREEQFNSTYRVVSVLTVLHQDWLNGKEYKCKVSNKGLPSSIEKTISKAKGQPREPQVYTLPPSQEEMTKNQVSLTCLVKGFYPSDIAVEWESNGQPENNYKTTPPVLDSDGSFFLYSRLTVDKSRWQEGNVFSCSVMHEALHNHYTQKSLSLSLGGGGSGSAHPIPDSSPLLQFGGQVRQRYLYTDDACQTEAHLEIREDGTVGGAADQSPESLLQLKALKPGVIQILGVKTSRFLCQRPDGALYGSLHFDPEACSFRELLLEDGYNVYQSEAHGLPLHLPGCKSPHRDPAPRGPARFLPLPGLPPAPPEPPGILAPQPPDVGSSDPLSMVGSQGRSPSYAS

SEQ ID NO: 68 - protein, 474 aa, Artificial Sequence
  Fusion Protein
GHGEGTFTSDLSIQLEEEAVRLFIEWLLAGGPSKGKPPPKGGGGGGGSGGGGSGGGGSAESKYGPPCPPCPAPEFEGGPSVFLFPPKPKDTLMISRTPEVTCVVVDVSQEDPEVQFNWYVDGVEVHNAKTKPREEQFNSTYRVVSVLTVLHQDWLNGKEYKCKVSNKGLPSSIEKTISKAKGQPREPQVYTLPPSQEEMTKNQVSLTCLVKGFYPSDIAVEWESNGQPENNYKTTPPVLDSDGSFFLYSRLTVDKSRWQEGNVFSCSVMHEALHNHYTQKSLSLSLGGGGSGSAHPIPDSSPLLQFGGQVRQRYLYTDDACQTEAHLEIREDGTVGGAADQSPESLLQLKALKPGVIQILGVKTSRFLCQRPDGALYGSLHFDPEACSFRELLLEDGYNVYQSEAHGLPLHLPGCKSPHRDPAPRGPARFLPLPGLPPAPPEPPGILAPQPPDVGSSDPLSMVGSQGRSPSYAS

SEQ ID NO: 69 - protein, 474 aa, Artificial Sequence
  Fusion Protein
GHGEGTFTSDLSIQLEEEAVRLFIEWLLAGGPSSGKPKPKGGGGGGGSGGGGSGGGGSAESKYGPPCPPCPAPEFEGGPSVFLFPPKPKDTLMISRTPEVTCVVVDVSQEDPEVQFNWYVDGVEVHNAKTKPREEQFNSTYRVVSVLTVLHQDWLNGKEYKCKVSNKGLPSSIEKTISKAKGQPREPQVYTLPPSQEEMTKNQVSLTCLVKGFYPSDIAVEWESNGQPENNYKTTPPVLDSDGSFFLYSRLTVDKSRWQEGNVFSCSVMHEALHNHYTQKSLSLSLGGGGSGSAHPIPDSSPLLQFGGQVRQRYLYTDDACQTEAHLEIREDGTVGGAADQSPESLLQLKALKPGVIQILGVKTSRFLCQRPDGALYGSLHFDPEACSFRELLLEDGYNVYQSEAHGLPLHLPGCKSPHRDPAPRGPARFLPLPGLPPAPPEPPGILAPQPPDVGSSDPLSMVGSQGRSPSYAS

SEQ ID NO: 70 - protein, 474 aa, Artificial Sequence
  Fusion Protein
GHGEGTFTSDLSIQLEEEAVRLFIEWLLAKGKSKGKPKPKGGGGGGGSGGGGSGGGGSAESKYGPPCPPCPAPEFEGGPSVFLFPPKPKDTLMISRTPEVTCVVVDVSQEDPEVQFNWYVDGVEVHNAKTKPREEQFNSTYRVVSVLTVLHQDWLNGKEYKCKVSNKGLPSSIEKTISKAKGQPREPQVYTLPPSQEEMTKNQVSLTCLVKGFYPSDIAVEWESNGQPENNYKTTPPVLDSDGSFFLYSRLTVDKSRWQEGNVFSCSVMHEALHNHYTQKSLSLSLGGGGSGSAHPIPDSSPLLQFGGQVRQRYLYTDDACQTEAHLEIREDGTVGGAADQSPESLLQLKALKPGVIQILGVKTSRFLCQRPDGALYGSLHFDPEACSFRELLLEDGYNVYQSEAHGLPLHLPGCKSPHRDPAPRGPARFLPLPGLPPAPPEPPGILAPQPPDVGSSDPLSMVGSQGRSPSYAS

SEQ ID NO: 71 - protein, 473 aa, Artificial Sequence
  Fusion Protein
FGEGTFTSDKSKQLEKRLVRLFIEWLIAGGHSSGKPPPKGGGGGGGSGGGGSGGGGSAESKYGPPCPPCPAPEFEGGPSVFLFPPKPKDTLMISRTPEVTCVVVDVSQEDPEVQFNWYVDGVEVHNAKTKPREEQFNSTYRVVSVLTVLHQDWLNGKEYKCKVSNKGLPSSIEKTISKAKGQPREPQVYTLPPSQEEMTKNQVSLTCLVKGFYPSDIAVEWESNGQPENNYKTTPPVLDSDGSFFLYSRLTVDKSRWQEGNVFSCSVMHEALHNHYTQKSLSLSLGGGGSGSAHPIPDSSPLLQFGGQVRQRYLYTDDACQTEAHLEIREDGTVGGAADQSPESLLQLKALKPGVIQILGVKTSRFLCQRPDGALYGSLHFDPEACSFRELLLEDGYNVYQSEAHGLPLHLPGCKSPHRDPAPRGPARFLPLPGLPPAPPEPPGILAPQPPDVGSSDPLSMVGSQGRSPSYAS

SEQ ID NO: 72 - protein, 473 aa, Artificial Sequence
  Fusion Protein
HGEGTFTSDKSKQLEKRLFRLFIEWLIAGGHSSGKPPPKGGGGGGGSGGGGSGGGGSAESKYGPPCPPCPAPEFEGGPSVFLFPPKPKDTLMISRTPEVTCVVVDVSQEDPEVQFNWYVDGVEVHNAKTKPREEQFNSTYRVVSVLTVLHQDWLNGKEYKCKVSNKGLPSSIEKTISKAKGQPREPQVYTLPPSQEEMTKNQVSLTCLVKGFYPSDIAVEWESNGQPENNYKTTPPVLDSDGSFFLYSRLTVDKSRWQEGNVFSCSVMHEALHNHYTQKSLSLSLGGGGSGSAHPIPDSSPLLQFGGQVRQRYLYTDDACQTEAHLEIREDGTVGGAADQSPESLLQLKALKPGVIQILGVKTSRFLCQRPDGALYGSLHFDPEACSFRELLLEDGYNVYQSEAHGLPLHLPGCKSPHRDPAPRGPARFLPLPGLPPAPPEPPGILAPQPPDVGSSDPLSMVGSQGRSPSYAS

SEQ ID NO: 73 - protein, 473 aa, Artificial Sequence
  Fusion Protein
HGEGTFTSDKSKQLEKRLVFLFIEWLIAGGHSSGKPPPKGGGGGGGSGGGGSGGGGSAESKYGPPCPPCPAPEFEGGPSVFLFPPKPKDTLMISRTPEVTCVVVDVSQEDPEVQFNWYVDGVEVHNAKTKPREEQFNSTYRVVSVLTVLHQDWLNGKEYKCKVSNKGLPSSIEKTISKAKGQPREPQVYTLPPSQEEMTKNQVSLTCLVKGFYPSDIAVEWESNGQPENNYKTTPPVLDSDGSFFLYSRLTVDKSRWQEGNVFSCSVMHEALHNHYTQKSLSLSLGGGGSGSAHPIPDSSPLLQFGGQVRQRYLYTDDACQTEAHLEIREDGTVGGAADQSPESLLQLKALKPGVIQILGVKTSRFLCQRPDGALYGSLHFDPEACSFRELLLEDGYNVYQSEAHGLPLHLPGCKSPHRDPAPRGPARFLPLPGLPPAPPEPPGILAPQPPDVGSSDPLSMVGSQGRSPSYAS

SEQ ID NO: 74 - protein, 473 aa, Artificial Sequence
  Fusion Protein
HGEGTFTSDKSKQLEKRLVILFIEWLIAGGHSSGKPPPKGGGGGGGSGGGGSGGGGSAESKYGPPCPPCPAPEFEGGPSVFLFPPKPKDTLMISRTPEVTCVVVDVSQEDPEVQFNWYVDGVEVHNAKTKPREEQFNSTYRVVSVLTVLHQDWLNGKEYKCKVSNKGLPSSIEKTISKAKGQPREPQVYTLPPSQEEMTKNQVSLTCLVKGFYPSDIAVEWESNGQPENNYKTTPPVLDSDGSFFLYSRLTVDKSRWQEGNVFSCSVMHEALHNHYTQKSLSLSLGGGGSGSAHPIPDSSPLLQFGGQVRQRYLYTDDACQTEAHLEIREDGTVGGAADQSPESLLQLKALKPGVIQILGVKTSRFLCQRPDGALYGSLHFDPEACSFRELLLEDGYNVYQSEAHGLPLHLPGCKSPHRDPAPRGPARFLPLPGLPPAPPEPPGILAPQPPDVGSSDPLSMVGSQGRSPSYAS

SEQ ID NO: 75 - protein, 473 aa, Artificial Sequence
  Fusion Protein
HGEGTFTSDKSKQLEKRLVRIFIEWLIAGGHSSGKPPPKGGGGGGGSGGGGSGGGGSAESKYGPPCPPCPAPEFEGGPSVFLFPPKPKDTLMISRTPEVTCVVVDVSQEDPEVQFNWYVDGVEVHNAKTKPREEQFNSTYRVVSVLTVLHQDWLNGKEYKCKVSNKGLPSSIEKTISKAKGQPREPQVYTLPPSQEEMTKNQVSLTCLVKGFYPSDIAVEWESNGQPENNYKTTPPVLDSDGSFFLYSRLTVDKSRWQEGNVFSCSVMHEALHNHYTQKSLSLSLGGGGSGSAHPIPDSSPLLQFGGQVRQRYLYTDDACQTEAHLEIREDGTVGGAADQSPESLLQLKALKPGVIQILGVKTSRFLCQRPDGALYGSLHFDPEACSFRELLLEDGYNVYQSEAHGLPLHLPGCKSPHRDPAPRGPARFLPLPGLPPAPPEPPGILAPQPPDVGSSDPLSMVGSQGRSPSYAS

SEQ ID NO: 76 - protein, 473 aa, Artificial Sequence
  Fusion Protein
HGEGTFTSDKSKQLEKRLVRLLIEWLIAGGHSSGKPPPKGGGGGGGSGGGGSGGGGSAESKYGPPCPPCPAPEFEGGPSVFLFPPKPKDTLMISRTPEVTCVVVDVSQEDPEVQFNWYVDGVEVHNAKTKPREEQFNSTYRVVSVLTVLHQDWLNGKEYKCKVSNKGLPSSIEKTISKAKGQPREPQVYTLPPSQEEMTKNQVSLTCLVKGFYPSDIAVEWESNGQPENNYKTTPPVLDSDGSFFLYSRLTVDKSRWQEGNVFSCSVMHEALHNHYTQKSLSLSLGGGGSGSAHPIPDSSPLLQFGGQVRQRYLYTDDACQTEAHLEIREDGTVGGAADQSPESLLQLKALKPGVIQILGVKTSRFLCQRPDGALYGSLHFDPEACSFRELLLEDGYNVYQSEAHGLPLHLPGCKSPHRDPAPRGPARFLPLPGLPPAPPEPPGILAPQPPDVGSSDPLSMVGSQGRSPSYAS

SEQ ID NO: 77 - protein, 473 aa, Artificial Sequence
  Fusion Protein
HGEGTFTSDKSKQLEKRLVRLFHEWLIAGGHSSGKPPPKGGGGGGGSGGGGSGGGGSAESKYGPPCPPCPAPEFEGGPSVFLFPPKPKDTLMISRTPEVTCVVVDVSQEDPEVQFNWYVDGVEVHNAKTKPREEQFNSTYRVVSVLTVLHQDWLNGKEYKCKVSNKGLPSSIEKTISKAKGQPREPQVYTLPPSQEEMTKNQVSLTCLVKGFYPSDIAVEWESNGQPENNYKTTPPVLDSDGSFFLYSRLTVDKSRWQEGNVFSCSVMHEALHNHYTQKSLSLSLGGGGSGSAHPIPDSSPLLQFGGQVRQRYLYTDDACQTEAHLEIREDGTVGGAADQSPESLLQLKALKPGVIQILGVKTSRFLCQRPDGALYGSLHFDPEACSFRELLLEDGYNVYQSEAHGLPLHLPGCKSPHRDPAPRGPARFLPLPGLPPAPPEPPGILAPQPPDVGSSDPLSMVGSQGRSPSYAS

SEQ ID NO: 78 - protein, 473 aa, Artificial Sequence
  Fusion Protein
HGEGTFTSDKSKQLEKRLVRLFYEWLIAGGHSSGKPPPKGGGGGGGSGGGGSGGGGSAESKYGPPCPPCPAPEFEGGPSVFLFPPKPKDTLMISRTPEVTCVVVDVSQEDPEVQFNWYVDGVEVHNAKTKPREEQFNSTYRVVSVLTVLHQDWLNGKEYKCKVSNKGLPSSIEKTISKAKGQPREPQVYTLPPSQEEMTKNQVSLTCLVKGFYPSDIAVEWESNGQPENNYKTTPPVLDSDGSFFLYSRLTVDKSRWQEGNVFSCSVMHEALHNHYTQKSLSLSLGGGGSGSAHPIPDSSPLLQFGGQVRQRYLYTDDACQTEAHLEIREDGTVGGAADQSPESLLQLKALKPGVIQILGVKTSRFLCQRPDGALYGSLHFDPEACSFRELLLEDGYNVYQSEAHGLPLHLPGCKSPHRDPAPRGPARFLPLPGLPPAPPEPPGILAPQPPDVGSSDPLSMVGSQGRSPSYAS

SEQ ID NO: 79 - protein, 473 aa, Artificial Sequence
  Fusion Protein
HGEGTFTSDKSKQLEKRLVRLFFEWLIAGGHSSGKPPPKGGGGGGGSGGGGSGGGGSAESKYGPPCPPCPAPEFEGGPSVFLFPPKPKDTLMISRTPEVTCVVVDVSQEDPEVQFNWYVDGVEVHNAKTKPREEQFNSTYRVVSVLTVLHQDWLNGKEYKCKVSNKGLPSSIEKTISKAKGQPREPQVYTLPPSQEEMTKNQVSLTCLVKGFYPSDIAVEWESNGQPENNYKTTPPVLDSDGSFFLYSRLTVDKSRWQEGNVFSCSVMHEALHNHYTQKSLSLSLGGGGSGSAHPIPDSSPLLQFGGQVRQRYLYTDDACQTEAHLEIREDGTVGGAADQSPESLLQLKALKPGVIQILGVKTSRFLCQRPDGALYGSLHFDPEACSFRELLLEDGYNVYQSEAHGLPLHLPGCKSPHRDPAPRGPARFLPLPGLPPAPPEPPGILAPQPPDVGSSDPLSMVGSQGRSPSYAS

SEQ ID NO: 80 - protein, 473 aa, Artificial Sequence
  Fusion Protein
HGEGTFTSDKSKQLEKRLVRLFILWLIAGGHSSGKPPPKGGGGGGGSGGGGSGGGGSAESKYGPPCPPCPAPEFEGGPSVFLFPPKPKDTLMISRTPEVTCVVVDVSQEDPEVQFNWYVDGVEVHNAKTKPREEQFNSTYRVVSVLTVLHQDWLNGKEYKCKVSNKGLPSSIEKTISKAKGQPREPQVYTLPPSQEEMTKNQVSLTCLVKGFYPSDIAVEWESNGQPENNYKTTPPVLDSDGSFFLYSRLTVDKSRWQEGNVFSCSVMHEALHNHYTQKSLSLSLGGGGSGSAHPIPDSSPLLQFGGQVRQRYLYTDDACQTEAHLEIREDGTVGGAADQSPESLLQLKALKPGVIQILGVKTSRFLCQRPDGALYGSLHFDPEACSFRELLLEDGYNVYQSEAHGLPLHLPGCKSPHRDPAPRGPARFLPLPGLPPAPPEPPGILAPQPPDVGSSDPLSMVGSQGRSPSYAS

SEQ ID NO: 81 - protein, 473 aa, Artificial Sequence
  Fusion Protein
HGEGTFTSDKSKQLEKRLVRLFIYWLIAGGHSSGKPPPKGGGGGGGSGGGGSGGGGSAESKYGPPCPPCPAPEFEGGPSVFLFPPKPKDTLMISRTPEVTCVVVDVSQEDPEVQFNWYVDGVEVHNAKTKPREEQFNSTYRVVSVLTVLHQDWLNGKEYKCKVSNKGLPSSIEKTISKAKGQPREPQVYTLPPSQEEMTKNQVSLTCLVKGFYPSDIAVEWESNGQPENNYKTTPPVLDSDGSFFLYSRLTVDKSRWQEGNVFSCSVMHEALHNHYTQKSLSLSLGGGGSGSAHPIPDSSPLLQFGGQVRQRYLYTDDACQTEAHLEIREDGTVGGAADQSPESLLQLKALKPGVIQILGVKTSRFLCQRPDGALYGSLHFDPEACSFRELLLEDGYNVYQSEAHGLPLHLPGCKSPHRDPAPRGPARFLPLPGLPPAPPEPPGILAPQPPDVGSSDPLSMVGSQGRSPSYAS

SEQ ID NO: 82 - protein, 473 aa, Artificial Sequence
  Fusion Protein
HGEGTFTSDKSKQLEKRLVRLFIELLIAGGHSSGKPPPKGGGGGGGSGGGGSGGGGSAESKYGPPCPPCPAPEFEGGPSVFLFPPKPKDTLMISRTPEVTCVVVDVSQEDPEVQFNWYVDGVEVHNAKTKPREEQFNSTYRVVSVLTVLHQDWLNGKEYKCKVSNKGLPSSIEKTISKAKGQPREPQVYTLPPSQEEMTKNQVSLTCLVKGFYPSDIAVEWESNGQPENNYKTTPPVLDSDGSFFLYSRLTVDKSRWQEGNVFSCSVMHEALHNHYTQKSLSLSLGGGGSGSAHPIPDSSPLLQFGGQVRQRYLYTDDACQTEAHLEIREDGTVGGAADQSPESLLQLKALKPGVIQILGVKTSRFLCQRPDGALYGSLHFDPEACSFRELLLEDGYNVYQSEAHGLPLHLPGCKSPHRDPAPRGPARFLPLPGLPPAPPEPPGILAPQPPDVGSSDPLSMVGSQGRSPSYAS

SEQ ID NO: 83 - protein, 472 aa, Artificial Sequence
  Fusion Protein
HGEGTFTSDKSKQLEKRLVRLFIEWLIAVGHSGKPPPKGGGGGGGSGGGGSGGGGSAESKYGPPCPPCPAPEFEGGPSVFLFPPKPKDTLMISRTPEVTCVVVDVSQEDPEVQFNWYVDGVEVHNAKTKPREEQFNSTYRVVSVLTVLHQDWLNGKEYKCKVSNKGLPSSIEKTISKAKGQPREPQVYTLPPSQEEMTKNQVSLTCLVKGFYPSDIAVEWESNGQPENNYKTTPPVLDSDGSFFLYSRLTVDKSRWQEGNVFSCSVMHEALHNHYTQKSLSLSLGGGGSGSAHPIPDSSPLLQFGGQVRQRYLYTDDACQTEAHLEIREDGTVGGAADQSPESLLQLKALKPGVIQILGVKTSRFLCQRPDGALYGSLHFDPEACSFRELLLEDGYNVYQSEAHGLPLHLPGCKSPHRDPAPRGPARFLPLPGLPPAPPEPPGILAPQPPDVGSSDPLSMVGSQGRSPSYAS

SEQ ID NO: 84 - protein, 473 aa, Artificial Sequence
  Fusion Protein
HGEGTFTSDLSIQLDEEAVREFIEWLLATGPVSGAPPPSGGGGGGGSGGGGSGGGGSAESKYGPPCPPCPAPEFEGGPSVFLFPPKPKDTLMISRTPEVTCVVVDVSQEDPEVQFNWYVDGVEVHNAKTKPREEQFNSTYRVVSVLTVLHQDWLNGKEYKCKVSNKGLPSSIEKTISKAKGQPREPQVYTLPPSQEEMTKNQVSLTCLVKGFYPSDIAVEWESNGQPENNYKTTPPVLDSDGSFFLYSRLTVDKSRWQEGNVFSCSVMHEALHNHYTQKSLSLSLGGGGSGSAHPIPDSSPLLQFGGQVRQRYLYTDDACQTEAHLEIREDGTVGGAADQSPESLLQLKALKPGVIQILGVKTSRFLCQRPDGALYGSLHFDPEACSFRELLLEDGYNVYQSEAHGLPLHLPGCKSPHRDPAPRGPARFLPLPGLPPAPPEPPGILAPQPPDVGSSDPLSMVGSQGRSPSYAS

SEQ ID NO: 85 - protein, 473 aa, Artificial Sequence
  Fusion Protein
HGEGTFTSDLSIQLDEEAVQEFIEWLLATGPSSGAPPPSGGGGGGGSGGGGSGGGGSAESKYGPPCPPCPAPEFEGGPSVFLFPPKPKDTLMISRTPEVTCVVVDVSQEDPEVQFNWYVDGVEVHNAKTKPREEQFNSTYRVVSVLTVLHQDWLNGKEYKCKVSNKGLPSSIEKTISKAKGQPREPQVYTLPPSQEEMTKNQVSLTCLVKGFYPSDIAVEWESNGQPENNYKTTPPVLDSDGSFFLYSRLTVDKSRWQEGNVFSCSVMHEALHNHYTQKSLSLSLGGGGSGSAHPIPDSSPLLQFGGQVRQRYLYTDDACQTEAHLEIREDGTVGGAADQSPESLLQLKALKPGVIQILGVKTSRFLCQRPDGALYGSLHFDPEACSFRELLLEDGYNVYQSEAHGLPLHLPGCKSPHRDPAPRGPARFLPLPGLPPAPPEPPGILAPQPPDVGSSDPLSMVGSQGRSPSYAS

SEQ ID NO: 86 - protein, 473 aa, Artificial Sequence
  Fusion Protein
HGEGTFTSDLSIQLDEEAVQLFIEWLLATGPSSGAPPPSGGGGGGGSGGGGSGGGGSAESKYGPPCPPCPAPEFEGGPSVFLFPPKPKDTLMISRTPEVTCVVVDVSQEDPEVQFNWYVDGVEVHNAKTKPREEQFNSTYRVVSVLTVLHQDWLNGKEYKCKVSNKGLPSSIEKTISKAKGQPREPQVYTLPPSQEEMTKNQVSLTCLVKGFYPSDIAVEWESNGQPENNYKTTPPVLDSDGSFFLYSRLTVDKSRWQEGNVFSCSVMHEALHNHYTQKSLSLSLGGGGSGSAHPIPDSSPLLQFGGQVRQRYLYTDDACQTEAHLEIREDGTVGGAADQSPESLLQLKALKPGVIQILGVKTSRFLCQRPDGALYGSLHFDPEACSFRELLLEDGYNVYQSEAHGLPLHLPGCKSPHRDPAPRGPARFLPLPGLPPAPPEPPGILAPQPPDVGSSDPLSMVGSQGRSPSYAS

SEQ ID NO: 87 - protein, 473 aa, Artificial Sequence
  Fusion Protein
HGEGTFTSDLSIQLDEEAVQLFIEWLLATGPVSGAPPPSGGGGGGGSGGGGSGGGGSAESKYGPPCPPCPAPEFEGGPSVFLFPPKPKDTLMISRTPEVTCVVVDVSQEDPEVQFNWYVDGVEVHNAKTKPREEQFNSTYRVVSVLTVLHQDWLNGKEYKCKVSNKGLPSSIEKTISKAKGQPREPQVYTLPPSQEEMTKNQVSLTCLVKGFYPSDIAVEWESNGQPENNYKTTPPVLDSDGSFFLYSRLTVDKSRWQEGNVFSCSVMHEALHNHYTQKSLSLSLGGGGSGSAHPIPDSSPLLQFGGQVRQRYLYTDDACQTEAHLEIREDGTVGGAADQSPESLLQLKALKPGVIQILGVKTSRFLCQRPDGALYGSLHFDPEACSFRELLLEDGYNVYQSEAHGLPLHLPGCKSPHRDPAPRGPARFLPLPGLPPAPPEPPGILAPQPPDVGSSDPLSMVGSQGRSPSYAS

SEQ ID NO: 88 - protein, 473 aa, Artificial Sequence
  Fusion Protein
HGEGTFTSDLSILLDEEAVREFIEWLLATGPSSGAPPPSGGGGGGGSGGGGSGGGGSAESKYGPPCPPCPAPEFEGGPSVFLFPPKPKDTLMISRTPEVTCVVVDVSQEDPEVQFNWYVDGVEVHNAKTKPREEQFNSTYRVVSVLTVLHQDWLNGKEYKCKVSNKGLPSSIEKTISKAKGQPREPQVYTLPPSQEEMTKNQVSLTCLVKGFYPSDIAVEWESNGQPENNYKTTPPVLDSDGSFFLYSRLTVDKSRWQEGNVFSCSVMHEALHNHYTQKSLSLSLGGGGSGSAHPIPDSSPLLQFGGQVRQRYLYTDDACQTEAHLEIREDGTVGGAADQSPESLLQLKALKPGVIQILGVKTSRFLCQRPDGALYGSLHFDPEACSFRELLLEDGYNVYQSEAHGLPLHLPGCKSPHRDPAPRGPARFLPLPGLPPAPPEPPGILAPQPPDVGSSDPLSMVGSQGRSPSYAS

SEQ ID NO: 89 - protein, 473 aa, Artificial Sequence
  Fusion Protein
HGEGTFTSDLSILLDEEAVRLFIEWLLATGPSSGAPPPSGGGGGGGSGGGGSGGGGSAESKYGPPCPPCPAPEFEGGPSVFLFPPKPKDTLMISRTPEVTCVVVDVSQEDPEVQFNWYVDGVEVHNAKTKPREEQFNSTYRVVSVLTVLHQDWLNGKEYKCKVSNKGLPSSIEKTISKAKGQPREPQVYTLPPSQEEMTKNQVSLTCLVKGFYPSDIAVEWESNGQPENNYKTTPPVLDSDGSFFLYSRLTVDKSRWQEGNVFSCSVMHEALHNHYTQKSLSLSLGGGGSGSAHPIPDSSPLLQFGGQVRQRYLYTDDACQTEAHLEIREDGTVGGAADQSPESLLQLKALKPGVIQILGVKTSRFLCQRPDGALYGSLHFDPEACSFRELLLEDGYNVYQSEAHGLPLHLPGCKSPHRDPAPRGPARFLPLPGLPPAPPEPPGILAPQPPDVGSSDPLSMVGSQGRSPSYAS

SEQ ID NO: 90 - protein, 473 aa, Artificial Sequence
  Fusion Protein
HGEGTFTSDLSILLDEEAVQLFIEWLLATGPSSGAPPPSGGGGGGGSGGGGSGGGGSAESKYGPPCPPCPAPEFEGGPSVFLFPPKPKDTLMISRTPEVTCVVVDVSQEDPEVQFNWYVDGVEVHNAKTKPREEQFNSTYRVVSVLTVLHQDWLNGKEYKCKVSNKGLPSSIEKTISKAKGQPREPQVYTLPPSQEEMTKNQVSLTCLVKGFYPSDIAVEWESNGQPENNYKTTPPVLDSDGSFFLYSRLTVDKSRWQEGNVFSCSVMHEALHNHYTQKSLSLSLGGGGSGSAHPIPDSSPLLQFGGQVRQRYLYTDDACQTEAHLEIREDGTVGGAADQSPESLLQLKALKPGVIQILGVKTSRFLCQRPDGALYGSLHFDPEACSFRELLLEDGYNVYQSEAHGLPLHLPGCKSPHRDPAPRGPARFLPLPGLPPAPPEPPGILAPQPPDVGSSDPLSMVGSQGRSPSYAS

SEQ ID NO: 91 - protein, 473 aa, Artificial Sequence
  Fusion Protein
HGEGTFTSDLSILLDEEAVQLFIEWLLATGPVSGAPPPSGGGGGGGSGGGGSGGGGSAESKYGPPCPPCPAPEFEGGPSVFLFPPKPKDTLMISRTPEVTCVVVDVSQEDPEVQFNWYVDGVEVHNAKTKPREEQFNSTYRVVSVLTVLHQDWLNGKEYKCKVSNKGLPSSIEKTISKAKGQPREPQVYTLPPSQEEMTKNQVSLTCLVKGFYPSDIAVEWESNGQPENNYKTTPPVLDSDGSFFLYSRLTVDKSRWQEGNVFSCSVMHEALHNHYTQKSLSLSLGGGGSGSAHPIPDSSPLLQFGGQVRQRYLYTDDACQTEAHLEIREDGTVGGAADQSPESLLQLKALKPGVIQILGVKTSRFLCQRPDGALYGSLHFDPEACSFRELLLEDGYNVYQSEAHGLPLHLPGCKSPHRDPAPRGPARFLPLPGLPPAPPEPPGILAPQPPDVGSSDPLSMVGSQGRSPSYAS

SEQ ID NO: 92 - protein, 473 aa, Artificial Sequence
  Fusion Protein
HGEGTFTSDLSIQLEEEAVRLFIEWLLATGPVSGAPPPSGGGGGGGSGGGGSGGGGSAESKYGPPCPPCPAPEFEGGPSVFLFPPKPKDTLMISRTPEVTCVVVDVSQEDPEVQFNWYVDGVEVHNAKTKPREEQFNSTYRVVSVLTVLHQDWLNGKEYKCKVSNKGLPSSIEKTISKAKGQPREPQVYTLPPSQEEMTKNQVSLTCLVKGFYPSDIAVEWESNGQPENNYKTTPPVLDSDGSFFLYSRLTVDKSRWQEGNVFSCSVMHEALHNHYTQKSLSLSLGGGGSGSAHPIPDSSPLLQFGGQVRQRYLYTDDACQTEAHLEIREDGTVGGAADQSPESLLQLKALKPGVIQILGVKTSRFLCQRPDGALYGSLHFDPEACSFRELLLEDGYNVYQSEAHGLPLHLPGCKSPHRDPAPRGPARFLPLPGLPPAPPEPPGILAPQPPDVGSSDPLSMVGSQGRSPSYAS

SEQ ID NO: 93 - protein, 473 aa, Artificial Sequence
  Fusion Protein
HGEGTFTSDLSIQLEEEAVQEFIEWLLATGPVSGAPPPSGGGGGGGSGGGGSGGGGSAESKYGPPCPPCPAPEFEGGPSVFLFPPKPKDTLMISRTPEVTCVVVDVSQEDPEVQFNWYVDGVEVHNAKTKPREEQFNSTYRVVSVLTVLHQDWLNGKEYKCKVSNKGLPSSIEKTISKAKGQPREPQVYTLPPSQEEMTKNQVSLTCLVKGFYPSDIAVEWESNGQPENNYKTTPPVLDSDGSFFLYSRLTVDKSRWQEGNVFSCSVMHEALHNHYTQKSLSLSLGGGGSGSAHPIPDSSPLLQFGGQVRQRYLYTDDACQTEAHLEIREDGTVGGAADQSPESLLQLKALKPGVIQILGVKTSRFLCQRPDGALYGSLHFDPEACSFRELLLEDGYNVYQSEAHGLPLHLPGCKSPHRDPAPRGPARFLPLPGLPPAPPEPPGILAPQPPDVGSSDPLSMVGSQGRSPSYAS

SEQ ID NO: 94 - protein, 473 aa, Artificial Sequence
  Fusion Protein
HGEGTFTSDLSIQLEEEAVQLFIEWLLATGPVSGAPPPSGGGGGGGSGGGGSGGGGSAESKYGPPCPPCPAPEFEGGPSVFLFPPKPKDTLMISRTPEVTCVVVDVSQEDPEVQFNWYVDGVEVHNAKTKPREEQFNSTYRVVSVLTVLHQDWLNGKEYKCKVSNKGLPSSIEKTISKAKGQPREPQVYTLPPSQEEMTKNQVSLTCLVKGFYPSDIAVEWESNGQPENNYKTTPPVLDSDGSFFLYSRLTVDKSRWQEGNVFSCSVMHEALHNHYTQKSLSLSLGGGGSGSAHPIPDSSPLLQFGGQVRQRYLYTDDACQTEAHLEIREDGTVGGAADQSPESLLQLKALKPGVIQILGVKTSRFLCQRPDGALYGSLHFDPEACSFRELLLEDGYNVYQSEAHGLPLHLPGCKSPHRDPAPRGPARFLPLPGLPPAPPEPPGILAPQPPDVGSSDPLSMVGSQGRSPSYAS

SEQ ID NO: 95 - protein, 473 aa, Artificial Sequence
  Fusion Protein
HGEGTFTSDLSILLEEEAVREFIEWLLATGPSSGAPPPSGGGGGGGSGGGGSGGGGSAESKYGPPCPPCPAPEFEGGPSVFLFPPKPKDTLMISRTPEVTCVVVDVSQEDPEVQFNWYVDGVEVHNAKTKPREEQFNSTYRVVSVLTVLHQDWLNGKEYKCKVSNKGLPSSIEKTISKAKGQPREPQVYTLPPSQEEMTKNQVSLTCLVKGFYPSDIAVEWESNGQPENNYKTTPPVLDSDGSFFLYSRLTVDKSRWQEGNVFSCSVMHEALHNHYTQKSLSLSLGGGGSGSAHPIPDSSPLLQFGGQVRQRYLYTDDACQTEAHLEIREDGTVGGAADQSPESLLQLKALKPGVIQILGVKTSRFLCQRPDGALYGSLHFDPEACSFRELLLEDGYNVYQSEAHGLPLHLPGCKSPHRDPAPRGPARFLPLPGLPPAPPEPPGILAPQPPDVGSSDPLSMVGSQGRSPSYAS

SEQ ID NO: 96 - protein, 473 aa, Artificial Sequence
  Fusion Protein
HGEGTFTSDLSILLEEEAVRLFIEWLLATGPSSGAPPPSGGGGGGGSGGGGSGGGGSAESKYGPPCPPCPAPEFEGGPSVFLFPPKPKDTLMISRTPEVTCVVVDVSQEDPEVQFNWYVDGVEVHNAKTKPREEQFNSTYRVVSVLTVLHQDWLNGKEYKCKVSNKGLPSSIEKTISKAKGQPREPQVYTLPPSQEEMTKNQVSLTCLVKGFYPSDIAVEWESNGQPENNYKTTPPVLDSDGSFFLYSRLTVDKSRWQEGNVFSCSVMHEALHNHYTQKSLSLSLGGGGSGSAHPIPDSSPLLQFGGQVRQRYLYTDDACQTEAHLEIREDGTVGGAADQSPESLLQLKALKPGVIQILGVKTSRFLCQRPDGALYGSLHFDPEACSFRELLLEDGYNVYQSEAHGLPLHLPGCKSPHRDPAPRGPARFLPLPGLPPAPPEPPGILAPQPPDVGSSDPLSMVGSQGRSPSYAS

SEQ ID NO: 97 - protein, 473 aa, Artificial Sequence
  Fusion Protein
HGEGTFTSDLSILLEEEAVRLFIEWLLATGPVSGAPPPSGGGGGGGSGGGGSGGGGSAESKYGPPCPPCPAPEFEGGPSVFLFPPKPKDTLMISRTPEVTCVVVDVSQEDPEVQFNWYVDGVEVHNAKTKPREEQFNSTYRVVSVLTVLHQDWLNGKEYKCKVSNKGLPSSIEKTISKAKGQPREPQVYTLPPSQEEMTKNQVSLTCLVKGFYPSDIAVEWESNGQPENNYKTTPPVLDSDGSFFLYSRLTVDKSRWQEGNVFSCSVMHEALHNHYTQKSLSLSLGGGGSGSAHPIPDSSPLLQFGGQVRQRYLYTDDACQTEAHLEIREDGTVGGAADQSPESLLQLKALKPGVIQILGVKTSRFLCQRPDGALYGSLHFDPEACSFRELLLEDGYNVYQSEAHGLPLHLPGCKSPHRDPAPRGPARFLPLPGLPPAPPEPPGILAPQPPDVGSSDPLSMVGSQGRSPSYAS

SEQ ID NO: 98 - protein, 474 aa, Artificial Sequence
  Fusion Protein
GHGEGTFTSDLSKQMEEEAVRLFIEWLKNGGPSSGAPPPSGGGGGGGSGGGGSGGGGSAESKYGPPCPPCPAPEFEGGPSVFLFPPKPKDTLMISRTPEVTCVVVDVSQEDPEVQFNWYVDGVEVHNAKTKPREEQFNSTYRVVSVLTVLHQDWLNGKEYKCKVSNKGLPSSIEKTISKAKGQPREPQVYTLPPSQEEMTKNQVSLTCLVKGFYPSDIAVEWESNGQPENNYKTTPPVLDSDGSFFLYSRLTVDKSRWQEGNVFSCSVMHEALHNHYTQKSLSLSLGGGGSGSAHPIPDSSPLLQFGGQVRQRYLYTDDACQTEAHLEIREDGTVGGAADQSPESLLQLKALKPGVIQILGVKTSRFLCQRPDGALYGSLHFDPEACSFRELLLEDGYNVYQSEAHGLPLHLPGCKSPHRDPAPRGPARFLPLPGLPPAPPEPPGILAPQPPDVGSSDPLSMVGSQGRSPSYAS

SEQ ID NO: 99 - protein, 473 aa, Artificial Sequence
  Fusion Protein
HGEGTFTSDLSKQLEEEAVQLFIEWLLNGGPSSGAPPPEGGGGGGGSGGGGSGGGGSAESKYGPPCPPCPAPEFEGGPSVFLFPPKPKDTLMISRTPEVTCVVVDVSQEDPEVQFNWYVDGVEVHNAKTKPREEQFNSTYRVVSVLTVLHQDWLNGKEYKCKVSNKGLPSSIEKTISKAKGQPREPQVYTLPPSQEEMTKNQVSLTCLVKGFYPSDIAVEWESNGQPENNYKTTPPVLDSDGSFFLYSRLTVDKSRWQEGNVFSCSVMHEALHNHYTQKSLSLSLGGGGSGSAHPIPDSSPLLQFGGQVRQRYLYTDDACQTEAHLEIREDGTVGGAADQSPESLLQLKALKPGVIQILGVKTSRFLCQRPDGALYGSLHFDPEACSFRELLLEDGYNVYQSEAHGLPLHLPGCKSPHRDPAPRGPARFLPLPGLPPAPPEPPGILAPQPPDVGSSDPLSMVGSQGRSPSYAS

SEQ ID NO: 100 - protein, 473 aa, Artificial Sequence
  Fusion Protein
HGEGTFTSDLSKQLEEEAVRLFIEWLLATGPSSGEPPPEGGGGGGGSGGGGSGGGGSAESKYGPPCPPCPAPEFEGGPSVFLFPPKPKDTLMISRTPEVTCVVVDVSQEDPEVQFNWYVDGVEVHNAKTKPREEQFNSTYRVVSVLTVLHQDWLNGKEYKCKVSNKGLPSSIEKTISKAKGQPREPQVYTLPPSQEEMTKNQVSLTCLVKGFYPSDIAVEWESNGQPENNYKTTPPVLDSDGSFFLYSRLTVDKSRWQEGNVFSCSVMHEALHNHYTQKSLSLSLGGGGSGSAHPIPDSSPLLQFGGQVRQRYLYTDDACQTEAHLEIREDGTVGGAADQSPESLLQLKALKPGVIQILGVKTSRFLCQRPDGALYGSLHFDPEACSFRELLLEDGYNVYQSEAHGLPLHLPGCKSPHRDPAPRGPARFLPLPGLPPAPPEPPGILAPQPPDVGSSDPLSMVGSQGRSPSYAS

SEQ ID NO: 101 - protein, 473 aa, Artificial Sequence
  Fusion Protein
HAQGTFTSDLSKQLESRRAQEFIEWLLATGPESGAPPPSGGGGGGGSGGGGSGGGGSAESKYGPPCPPCPAPEFEGGPSVFLFPPKPKDTLMISRTPEVTCVVVDVSQEDPEVQFNWYVDGVEVHNAKTKPREEQFNSTYRVVSVLTVLHQDWLNGKEYKCKVSNKGLPSSIEKTISKAKGQPREPQVYTLPPSQEEMTKNQVSLTCLVKGFYPSDIAVEWESNGQPENNYKTTPPVLDSDGSFFLYSRLTVDKSRWQEGNVFSCSVMHEALHNHYTQKSLSLSLGGGGSGSAHPIPDSSPLLQFGGQVRQRYLYTDDACQTEAHLEIREDGTVGGAADQSPESLLQLKALKPGVIQILGVKTSRFLCQRPDGALYGSLHFDPEACSFRELLLEDGYNVYQSEAHGLPLHLPGCKSPHRDPAPRGPARFLPLPGLPPAPPEPPGILAPQPPDVGSSDPLSMVGSQGRSPSYAS

SEQ ID NO: 102 - protein, 473 aa, Artificial Sequence
  Fusion Protein
HSQGTFTSDLSKQLESRRARRFIEWLLATGPESGAPPPSGGGGGGGSGGGGSGGGGSAESKYGPPCPPCPAPEFEGGPSVFLFPPKPKDTLMISRTPEVTCVVVDVSQEDPEVQFNWYVDGVEVHNAKTKPREEQFNSTYRVVSVLTVLHQDWLNGKEYKCKVSNKGLPSSIEKTISKAKGQPREPQVYTLPPSQEEMTKNQVSLTCLVKGFYPSDIAVEWESNGQPENNYKTTPPVLDSDGSFFLYSRLTVDKSRWQEGNVFSCSVMHEALHNHYTQKSLSLSLGGGGSGSAHPIPDSSPLLQFGGQVRQRYLYTDDACQTEAHLEIREDGTVGGAADQSPESLLQLKALKPGVIQILGVKTSRFLCQRPDGALYGSLHFDPEACSFRELLLEDGYNVYQSEAHGLPLHLPGCKSPHRDPAPRGPARFLPLPGLPPAPPEPPGILAPQPPDVGSSDPLSMVGSQGRSPSYAS

SEQ ID NO: 103 - protein, 473 aa, Artificial Sequence
  Fusion Protein
HGEGTFTSDKSQLLEKRAAHLFIEWLIKGGHSKGKPPPKGGGGGGGSGGGGSGGGGSAESKYGPPCPPCPAPEFEGGPSVFLFPPKPKDTLMISRTPEVTCVVVDVSQEDPEVQFNWYVDGVEVHNAKTKPREEQFNSTYRVVSVLTVLHQDWLNGKEYKCKVSNKGLPSSIEKTISKAKGQPREPQVYTLPPSQEEMTKNQVSLTCLVKGFYPSDIAVEWESNGQPENNYKTTPPVLDSDGSFFLYSRLTVDKSRWQEGNVFSCSVMHEALHNHYTQKSLSLSLGGGGSGSAHPIPDSSPLLQFGGQVRQRYLYTDDACQTEAHLEIREDGTVGGAADQSPESLLQLKALKPGVIQILGVKTSRFLCQRPDGALYGSLHFDPEACSFRELLLEDGYNVYQSEAHGLPLHLPGCKSPHRDPAPRGPARFLPLPGLPPAPPEPPGILAPQPPDVGSSDPLSMVGSQGRSPSYAS

SEQ ID NO: 104 - protein, 473 aa, Artificial Sequence
  Fusion Protein
HGEGTFTSDKSQLLEKRLAHLFIEWLIKGGHSSGKPPPKGGGGGGGSGGGGSGGGGSAESKYGPPCPPCPAPEFEGGPSVFLFPPKPKDTLMISRTPEVTCVVVDVSQEDPEVQFNWYVDGVEVHNAKTKPREEQFNSTYRVVSVLTVLHQDWLNGKEYKCKVSNKGLPSSIEKTISKAKGQPREPQVYTLPPSQEEMTKNQVSLTCLVKGFYPSDIAVEWESNGQPENNYKTTPPVLDSDGSFFLYSRLTVDKSRWQEGNVFSCSVMHEALHNHYTQKSLSLSLGGGGSGSAHPIPDSSPLLQFGGQVRQRYLYTDDACQTEAHLEIREDGTVGGAADQSPESLLQLKALKPGVIQILGVKTSRFLCQRPDGALYGSLHFDPEACSFRELLLEDGYNVYQSEAHGLPLHLPGCKSPHRDPAPRGPARFLPLPGLPPAPPEPPGILAPQPPDVGSSDPLSMVGSQGRSPSYAS

SEQ ID NO: 105 - protein, 473 aa, Artificial Sequence
  Fusion Protein
HGEGTFTSDKSQLLEERLAHLFIEWLIKGGHSSIKPPPKGGGGGGGSGGGGSGGGGSAESKYGPPCPPCPAPEFEGGPSVFLFPPKPKDTLMISRTPEVTCVVVDVSQEDPEVQFNWYVDGVEVHNAKTKPREEQFNSTYRVVSVLTVLHQDWLNGKEYKCKVSNKGLPSSIEKTISKAKGQPREPQVYTLPPSQEEMTKNQVSLTCLVKGFYPSDIAVEWESNGQPENNYKTTPPVLDSDGSFFLYSRLTVDKSRWQEGNVFSCSVMHEALHNHYTQKSLSLSLGGGGSGSAHPIPDSSPLLQFGGQVRQRYLYTDDACQTEAHLEIREDGTVGGAADQSPESLLQLKALKPGVIQILGVKTSRFLCQRPDGALYGSLHFDPEACSFRELLLEDGYNVYQSEAHGLPLHLPGCKSPHRDPAPRGPARFLPLPGLPPAPPEPPGILAPQPPDVGSSDPLSMVGSQGRSPSYAS

SEQ ID NO: 106 - protein, 473 aa, Artificial Sequence
  Fusion Protein
HGEGTFTSDKSQLLEERLAHLFIEWLIAGGHSSGRPPPKGGGGGGGSGGGGSGGGGSAESKYGPPCPPCPAPEFEGGPSVFLFPPKPKDTLMISRTPEVTCVVVDVSQEDPEVQFNWYVDGVEVHNAKTKPREEQFNSTYRVVSVLTVLHQDWLNGKEYKCKVSNKGLPSSIEKTISKAKGQPREPQVYTLPPSQEEMTKNQVSLTCLVKGFYPSDIAVEWESNGQPENNYKTTPPVLDSDGSFFLYSRLTVDKSRWQEGNVFSCSVMHEALHNHYTQKSLSLSLGGGGSGSAHPIPDSSPLLQFGGQVRQRYLYTDDACQTEAHLEIREDGTVGGAADQSPESLLQLKALKPGVIQILGVKTSRFLCQRPDGALYGSLHFDPEACSFRELLLEDGYNVYQSEAHGLPLHLPGCKSPHRDPAPRGPARFLPLPGLPPAPPEPPGILAPQPPDVGSSDPLSMVGSQGRSPSYAS

SEQ ID NO: 107 - protein, 473 aa, Artificial Sequence
  Fusion Protein
YGEGTFTSDKSQLLEERLAHLFIEWLIAGGHSKIRPPPKGGGGGGGSGGGGSGGGGSAESKYGPPCPPCPAPEFEGGPSVFLFPPKPKDTLMISRTPEVTCVVVDVSQEDPEVQFNWYVDGVEVHNAKTKPREEQFNSTYRVVSVLTVLHQDWLNGKEYKCKVSNKGLPSSIEKTISKAKGQPREPQVYTLPPSQEEMTKNQVSLTCLVKGFYPSDIAVEWESNGQPENNYKTTPPVLDSDGSFFLYSRLTVDKSRWQEGNVFSCSVMHEALHNHYTQKSLSLSLGGGGSGSAHPIPDSSPLLQFGGQVRQRYLYTDDACQTEAHLEIREDGTVGGAADQSPESLLQLKALKPGVIQILGVKTSRFLCQRPDGALYGSLHFDPEACSFRELLLEDGYNVYQSEAHGLPLHLPGCKSPHRDPAPRGPARFLPLPGLPPAPPEPPGILAPQPPDVGSSDPLSMVGSQGRSPSYAS

SEQ ID NO: 108 - protein, 473 aa, Artificial Sequence
  Fusion Protein
YGEGTFTSDKSQLLEERLVHLFIEWLIAGGHSKIKPPPKGGGGGGGSGGGGSGGGGSAESKYGPPCPPCPAPEFEGGPSVFLFPPKPKDTLMISRTPEVTCVVVDVSQEDPEVQFNWYVDGVEVHNAKTKPREEQFNSTYRVVSVLTVLHQDWLNGKEYKCKVSNKGLPSSIEKTISKAKGQPREPQVYTLPPSQEEMTKNQVSLTCLVKGFYPSDIAVEWESNGQPENNYKTTPPVLDSDGSFFLYSRLTVDKSRWQEGNVFSCSVMHEALHNHYTQKSLSLSLGGGGSGSAHPIPDSSPLLQFGGQVRQRYLYTDDACQTEAHLEIREDGTVGGAADQSPESLLQLKALKPGVIQILGVKTSRFLCQRPDGALYGSLHFDPEACSFRELLLEDGYNVYQSEAHGLPLHLPGCKSPHRDPAPRGPARFLPLPGLPPAPPEPPGILAPQPPDVGSSDPLSMVGSQGRSPSYAS

SEQ ID NO: 109 - protein, 473 aa, Artificial Sequence
  Fusion Protein
YGEGTFTSDKSQLLEKELAHLFIEWLIAGGHKSGRPSPKGGGGGGGSGGGGSGGGGSAESKYGPPCPPCPAPEFEGGPSVFLFPPKPKDTLMISRTPEVTCVVVDVSQEDPEVQFNWYVDGVEVHNAKTKPREEQFNSTYRVVSVLTVLHQDWLNGKEYKCKVSNKGLPSSIEKTISKAKGQPREPQVYTLPPSQEEMTKNQVSLTCLVKGFYPSDIAVEWESNGQPENNYKTTPPVLDSDGSFFLYSRLTVDKSRWQEGNVFSCSVMHEALHNHYTQKSLSLSLGGGGSGSAHPIPDSSPLLQFGGQVRQRYLYTDDACQTEAHLEIREDGTVGGAADQSPESLLQLKALKPGVIQILGVKTSRFLCQRPDGALYGSLHFDPEACSFRELLLEDGYNVYQSEAHGLPLHLPGCKSPHRDPAPRGPARFLPLPGLPPAPPEPPGILAPQPPDVGSSDPLSMVGSQGRSPSYAS

SEQ ID NO: 110 - protein, 473 aa, Artificial Sequence
  Fusion Protein
HGEGTFTSDKSQLLEKRLAHLFIEWLLAGGPSSGKPPPKGGGGGGGSGGGGSGGGGSAESKYGPPCPPCPAPEFEGGPSVFLFPPKPKDTLMISRTPEVTCVVVDVSQEDPEVQFNWYVDGVEVHNAKTKPREEQFNSTYRVVSVLTVLHQDWLNGKEYKCKVSNKGLPSSIEKTISKAKGQPREPQVYTLPPSQEEMTKNQVSLTCLVKGFYPSDIAVEWESNGQPENNYKTTPPVLDSDGSFFLYSRLTVDKSRWQEGNVFSCSVMHEALHNHYTQKSLSLSLGGGGSGSAHPIPDSSPLLQFGGQVRQRYLYTDDACQTEAHLEIREDGTVGGAADQSPESLLQLKALKPGVIQILGVKTSRFLCQRPDGALYGSLHFDPEACSFRELLLEDGYNVYQSEAHGLPLHLPGCKSPHRDPAPRGPARFLPLPGLPPAPPEPPGILAPQPPDVGSSDPLSMVGSQGRSPSYAS

SEQ ID NO: 111 - protein, 473 aa, Artificial Sequence
  Fusion Protein
HGEGTFTSDKSQLLEKRAAHLFIEWLIAGGPSKGKPPPKGGGGGGGSGGGGSGGGGSAESKYGPPCPPCPAPEFEGGPSVFLFPPKPKDTLMISRTPEVTCVVVDVSQEDPEVQFNWYVDGVEVHNAKTKPREEQFNSTYRVVSVLTVLHQDWLNGKEYKCKVSNKGLPSSIEKTISKAKGQPREPQVYTLPPSQEEMTKNQVSLTCLVKGFYPSDIAVEWESNGQPENNYKTTPPVLDSDGSFFLYSRLTVDKSRWQEGNVFSCSVMHEALHNHYTQKSLSLSLGGGGSGSAHPIPDSSPLLQFGGQVRQRYLYTDDACQTEAHLEIREDGTVGGAADQSPESLLQLKALKPGVIQILGVKTSRFLCQRPDGALYGSLHFDPEACSFRELLLEDGYNVYQSEAHGLPLHLPGCKSPHRDPAPRGPARFLPLPGLPPAPPEPPGILAPQPPDVGSSDPLSMVGSQGRSPSYAS

SEQ ID NO: 112 - protein, 473 aa, Artificial Sequence
  Fusion protein
HGEGTFTSDKSQLLEKRLAHLFIEWLLAGGPSSGRPPPKGGGGGGGSGGGGSGGGGSAESKYGPPCPPCPAPEFEGGPSVFLFPPKPKDTLMISRTPEVTCVVVDVSQEDPEVQFNWYVDGVEVHNAKTKPREEQFNSTYRVVSVLTVLHQDWLNGKEYKCKVSNKGLPSSIEKTISKAKGQPREPQVYTLPPSQEEMTKNQVSLTCLVKGFYPSDIAVEWESNGQPENNYKTTPPVLDSDGSFFLYSRLTVDKSRWQEGNVFSCSVMHEALHNHYTQKSLSLSLGGGGSGSAHPIPDSSPLLQFGGQVRQRYLYTDDACQTEAHLEIREDGTVGGAADQSPESLLQLKALKPGVIQILGVKTSRFLCQRPDGALYGSLHFDPEACSFRELLLEDGYNVYQSEAHGLPLHLPGCKSPHRDPAPRGPARFLPLPGLPPAPPEPPGILAPQPPDVGSSDPLSMVGSQGRSPSYAS

SEQ ID NO: 113 - protein, 473 aa, Artificial Sequence
  Fusion Protein
YGEGTFTSDKSQLLEKRLAHLFIEWLIKGGHSSIRPPPKGGGGGGGSGGGGSGGGGSAESKYGPPCPPCPAPEFEGGPSVFLFPPKPKDTLMISRTPEVTCVVVDVSQEDPEVQFNWYVDGVEVHNAKTKPREEQFNSTYRVVSVLTVLHQDWLNGKEYKCKVSNKGLPSSIEKTISKAKGQPREPQVYTLPPSQEEMTKNQVSLTCLVKGFYPSDIAVEWESNGQPENNYKTTPPVLDSDGSFFLYSRLTVDKSRWQEGNVFSCSVMHEALHNHYTQKSLSLSLGGGGSGSAHPIPDSSPLLQFGGQVRQRYLYTDDACQTEAHLEIREDGTVGGAADQSPESLLQLKALKPGVIQILGVKTSRFLCQRPDGALYGSLHFDPEACSFRELLLEDGYNVYQSEAHGLPLHLPGCKSPHRDPAPRGPARFLPLPGLPPAPPEPPGILAPQPPDVGSSDPLSMVGSQGRSPSYAS

SEQ ID NO: 114 - protein, 474 aa, Artificial Sequence
  Fusion Protein
GHGEGTFTSDKSQLLEKRLVHLFIEWLIAGGHSSGKLPPKGGGGGGGSGGGGSGGGGSAESKYGPPCPPCPAPEFEGGPSVFLFPPKPKDTLMISRTPEVTCVVVDVSQEDPEVQFNWYVDGVEVHNAKTKPREEQFNSTYRVVSVLTVLHQDWLNGKEYKCKVSNKGLPSSIEKTISKAKGQPREPQVYTLPPSQEEMTKNQVSLTCLVKGFYPSDIAVEWESNGQPENNYKTTPPVLDSDGSFFLYSRLTVDKSRWQEGNVFSCSVMHEALHNHYTQKSLSLSLGGGGSGSAHPIPDSSPLLQFGGQVRQRYLYTDDACQTEAHLEIREDGTVGGAADQSPESLLQLKALKPGVIQILGVKTSRFLCQRPDGALYGSLHFDPEACSFRELLLEDGYNVYQSEAHGLPLHLPGCKSPHRDPAPRGPARFLPLPGLPPAPPEPPGILAPQPPDVGSSDPLSMVGSQGRSPSYAS

SEQ ID NO: 115 - protein, 473 aa, Artificial Sequence
  Fusion Protein
YGEGTFTSDKSQLLEKRLAHLFIEWLIKGGHSSIKPPPKGGGGGGGSGGGGSGGGGSAESKYGPPCPPCPAPEFEGGPSVFLFPPKPKDTLMISRTPEVTCVVVDVSQEDPEVQFNWYVDGVEVHNAKTKPREEQFNSTYRVVSVLTVLHQDWLNGKEYKCKVSNKGLPSSIEKTISKAKGQPREPQVYTLPPSQEEMTKNQVSLTCLVKGFYPSDIAVEWESNGQPENNYKTTPPVLDSDGSFFLYSRLTVDKSRWQEGNVFSCSVMHEALHNHYTQKSLSLSLGGGGSGSAHPIPDSSPLLQFGGQVRQRYLYTDDACQTEAHLEIREDGTVGGAADQSPESLLQLKALKPGVIQILGVKTSRFLCQRPDGALYGSLHFDPEACSFRELLLEDGYNVYQSEAHGLPLHLPGCKSPHRDPAPRGPARFLPLPGLPPAPPEPPGILAPQPPDVGSSDPLSMVGSQGRSPSYAS

SEQ ID NO: 116 - protein, 473 aa, Artificial Sequence
  Fusion Protein
HGEGTFTSDKSQLLEKRLAHLFIEWLIAGGPSKGKPPPKGGGGGGGSGGGGSGGGGSAESKYGPPCPPCPAPEFEGGPSVFLFPPKPKDTLMISRTPEVTCVVVDVSQEDPEVQFNWYVDGVEVHNAKTKPREEQFNSTYRVVSVLTVLHQDWLNGKEYKCKVSNKGLPSSIEKTISKAKGQPREPQVYTLPPSQEEMTKNQVSLTCLVKGFYPSDIAVEWESNGQPENNYKTTPPVLDSDGSFFLYSRLTVDKSRWQEGNVFSCSVMHEALHNHYTQKSLSLSLGGGGSGSAHPIPDSSPLLQFGGQVRQRYLYTDDACQTEAHLEIREDGTVGGAADQSPESLLQLKALKPGVIQILGVKTSRFLCQRPDGALYGSLHFDPEACSFRELLLEDGYNVYQSEAHGLPLHLPGCKSPHRDPAPRGPARFLPLPGLPPAPPEPPGILAPQPPDVGSSDPLSMVGSQGRSPSYAS

SEQ ID NO: 117 - protein, 473 aa, Artificial Sequence
  Fusion Protein
HGEGTFTSDKSQLLEKRAAHLFIEWLIKGGHSSIKPPPKGGGGGGGSGGGGSGGGGSAESKYGPPCPPCPAPEFEGGPSVFLFPPKPKDTLMISRTPEVTCVVVDVSQEDPEVQFNWYVDGVEVHNAKTKPREEQFNSTYRVVSVLTVLHQDWLNGKEYKCKVSNKGLPSSIEKTISKAKGQPREPQVYTLPPSQEEMTKNQVSLTCLVKGFYPSDIAVEWESNGQPENNYKTTPPVLDSDGSFFLYSRLTVDKSRWQEGNVFSCSVMHEALHNHYTQKSLSLSLGGGGSGSAHPIPDSSPLLQFGGQVRQRYLYTDDACQTEAHLEIREDGTVGGAADQSPESLLQLKALKPGVIQILGVKTSRFLCQRPDGALYGSLHFDPEACSFRELLLEDGYNVYQSEAHGLPLHLPGCKSPHRDPAPRGPARFLPLPGLPPAPPEPPGILAPQPPDVGSSDPLSMVGSQGRSPSYAS

SEQ ID NO: 118 - protein, 473 aa, Artificial Sequence
  Fusion Protein
HGEGTFTSDKSQLLEKRLAHLFIEWLIAGGHSKIKYPPKGGGGGGGSGGGGSGGGGSAESKYGPPCPPCPAPEFEGGPSVFLFPPKPKDTLMISRTPEVTCVVVDVSQEDPEVQFNWYVDGVEVHNAKTKPREEQFNSTYRVVSVLTVLHQDWLNGKEYKCKVSNKGLPSSIEKTISKAKGQPREPQVYTLPPSQEEMTKNQVSLTCLVKGFYPSDIAVEWESNGQPENNYKTTPPVLDSDGSFFLYSRLTVDKSRWQEGNVFSCSVMHEALHNHYTQKSLSLSLGGGGSGSAHPIPDSSPLLQFGGQVRQRYLYTDDACQTEAHLEIREDGTVGGAADQSPESLLQLKALKPGVIQILGVKTSRFLCQRPDGALYGSLHFDPEACSFRELLLEDGYNVYQSEAHGLPLHLPGCKSPHRDPAPRGPARFLPLPGLPPAPPEPPGILAPQPPDVGSSDPLSMVGSQGRSPSYAS

SEQ ID NO: 119 - protein, 473 aa, Artificial Sequence
  Fusion Protein
HGEGTFTSDKSQLLEKELAHLFIEWLIAGGHSSIKPPPKGGGGGGGSGGGGSGGGGSAESKYGPPCPPCPAPEFEGGPSVFLFPPKPKDTLMISRTPEVTCVVVDVSQEDPEVQFNWYVDGVEVHNAKTKPREEQFNSTYRVVSVLTVLHQDWLNGKEYKCKVSNKGLPSSIEKTISKAKGQPREPQVYTLPPSQEEMTKNQVSLTCLVKGFYPSDIAVEWESNGQPENNYKTTPPVLDSDGSFFLYSRLTVDKSRWQEGNVFSCSVMHEALHNHYTQKSLSLSLGGGGSGSAHPIPDSSPLLQFGGQVRQRYLYTDDACQTEAHLEIREDGTVGGAADQSPESLLQLKALKPGVIQILGVKTSRFLCQRPDGALYGSLHFDPEACSFRELLLEDGYNVYQSEAHGLPLHLPGCKSPHRDPAPRGPARFLPLPGLPPAPPEPPGILAPQPPDVGSSDPLSMVGSQGRSPSYAS

SEQ ID NO: 120 - protein, 473 aa, Artificial Sequence
  Fusion Protein
HGEGTFTSDKSQLLEKRLAHLFIEWLIAGGHKKGKYPPKGGGGGGGSGGGGSGGGGSAESKYGPPCPPCPAPEFEGGPSVFLFPPKPKDTLMISRTPEVTCVVVDVSQEDPEVQFNWYVDGVEVHNAKTKPREEQFNSTYRVVSVLTVLHQDWLNGKEYKCKVSNKGLPSSIEKTISKAKGQPREPQVYTLPPSQEEMTKNQVSLTCLVKGFYPSDIAVEWESNGQPENNYKTTPPVLDSDGSFFLYSRLTVDKSRWQEGNVFSCSVMHEALHNHYTQKSLSLSLGGGGSGSAHPIPDSSPLLQFGGQVRQRYLYTDDACQTEAHLEIREDGTVGGAADQSPESLLQLKALKPGVIQILGVKTSRFLCQRPDGALYGSLHFDPEACSFRELLLEDGYNVYQSEAHGLPLHLPGCKSPHRDPAPRGPARFLPLPGLPPAPPEPPGILAPQPPDVGSSDPLSMVGSQGRSPSYAS

SEQ ID NO: 121 - protein, 473 aa, Artificial Sequence
  Fusion Protein
HGEGTFTSDKSQLLEKRLAHLFIEWLIAGGPSSGRYPPKGGGGGGGSGGGGSGGGGSAESKYGPPCPPCPAPEFEGGPSVFLFPPKPKDTLMISRTPEVTCVVVDVSQEDPEVQFNWYVDGVEVHNAKTKPREEQFNSTYRVVSVLTVLHQDWLNGKEYKCKVSNKGLPSSIEKTISKAKGQPREPQVYTLPPSQEEMTKNQVSLTCLVKGFYPSDIAVEWESNGQPENNYKTTPPVLDSDGSFFLYSRLTVDKSRWQEGNVFSCSVMHEALHNHYTQKSLSLSLGGGGSGSAHPIPDSSPLLQFGGQVRQRYLYTDDACQTEAHLEIREDGTVGGAADQSPESLLQLKALKPGVIQILGVKTSRFLCQRPDGALYGSLHFDPEACSFRELLLEDGYNVYQSEAHGLPLHLPGCKSPHRDPAPRGPARFLPLPGLPPAPPEPPGILAPQPPDVGSSDPLSMVGSQGRSPSYAS

SEQ ID NO: 122 - protein, 473 aa, Artificial Sequence
  Fusion Protein
HGEGTFTSDKSQLLEKRLAHLFIEWLIAGGHSSIKPPPKGGGGGGGSGGGGSGGGGSAESKYGPPCPPCPAPEFEGGPSVFLFPPKPKDTLMISRTPEVTCVVVDVSQEDPEVQFNWYVDGVEVHNAKTKPREEQFNSTYRVVSVLTVLHQDWLNGKEYKCKVSNKGLPSSIEKTISKAKGQPREPQVYTLPPSQEEMTKNQVSLTCLVKGFYPSDIAVEWESNGQPENNYKTTPPVLDSDGSFFLYSRLTVDKSRWQEGNVFSCSVMHEALHNHYTQKSLSLSLGGGGSGSAHPIPDSSPLLQFGGQVRQRYLYTDDACQTEAHLEIREDGTVGGAADQSPESLLQLKALKPGVIQILGVKTSRFLCQRPDGALYGSLHFDPEACSFRELLLEDGYNVYQSEAHGLPLHLPGCKSPHRDPAPRGPARFLPLPGLPPAPPEPPGILAPQPPDVGSSDPLSMVGSQGRSPSYAS

SEQ ID NO: 123 - protein, 473 aa, Artificial Sequence
  Fusion Protein
HGEGTFTSDKSKLLEKRLAHLFIEWLIKGGHSSIKPPPKGGGGGGGSGGGGSGGGGSAESKYGPPCPPCPAPEFEGGPSVFLFPPKPKDTLMISRTPEVTCVVVDVSQEDPEVQFNWYVDGVEVHNAKTKPREEQFNSTYRVVSVLTVLHQDWLNGKEYKCKVSNKGLPSSIEKTISKAKGQPREPQVYTLPPSQEEMTKNQVSLTCLVKGFYPSDIAVEWESNGQPENNYKTTPPVLDSDGSFFLYSRLTVDKSRWQEGNVFSCSVMHEALHNHYTQKSLSLSLGGGGSGSAHPIPDSSPLLQFGGQVRQRYLYTDDACQTEAHLEIREDGTVGGAADQSPESLLQLKALKPGVIQILGVKTSRFLCQRPDGALYGSLHFDPEACSFRELLLEDGYNVYQSEAHGLPLHLPGCKSPHRDPAPRGPARFLPLPGLPPAPPEPPGILAPQPPDVGSSDPLSMVGSQGRSPSYAS

SEQ ID NO: 124 - protein, 473 aa, Artificial Sequence
  Fusion Protein
HGEGTFTSDKSKLLEKRLAHLFIEWLIAGGHSKGKPPPKGGGGGGGSGGGGSGGGGSAESKYGPPCPPCPAPEFEGGPSVFLFPPKPKDTLMISRTPEVTCVVVDVSQEDPEVQFNWYVDGVEVHNAKTKPREEQFNSTYRVVSVLTVLHQDWLNGKEYKCKVSNKGLPSSIEKTISKAKGQPREPQVYTLPPSQEEMTKNQVSLTCLVKGFYPSDIAVEWESNGQPENNYKTTPPVLDSDGSFFLYSRLTVDKSRWQEGNVFSCSVMHEALHNHYTQKSLSLSLGGGGSGSAHPIPDSSPLLQFGGQVRQRYLYTDDACQTEAHLEIREDGTVGGAADQSPESLLQLKALKPGVIQILGVKTSRFLCQRPDGALYGSLHFDPEACSFRELLLEDGYNVYQSEAHGLPLHLPGCKSPHRDPAPRGPARFLPLPGLPPAPPEPPGILAPQPPDVGSSDPLSMVGSQGRSPSYAS

SEQ ID NO: 125 - protein, 473 aa, Artificial Sequence
  Fusion Protein
HGEGTFTSDKSQLLEKEAAHLFIEWLIAGGHSKGKPPPKGGGGGGGSGGGGSGGGGSAESKYGPPCPPCPAPEFEGGPSVFLFPPKPKDTLMISRTPEVTCVVVDVSQEDPEVQFNWYVDGVEVHNAKTKPREEQFNSTYRVVSVLTVLHQDWLNGKEYKCKVSNKGLPSSIEKTISKAKGQPREPQVYTLPPSQEEMTKNQVSLTCLVKGFYPSDIAVEWESNGQPENNYKTTPPVLDSDGSFFLYSRLTVDKSRWQEGNVFSCSVMHEALHNHYTQKSLSLSLGGGGSGSAHPIPDSSPLLQFGGQVRQRYLYTDDACQTEAHLEIREDGTVGGAADQSPESLLQLKALKPGVIQILGVKTSRFLCQRPDGALYGSLHFDPEACSFRELLLEDGYNVYQSEAHGLPLHLPGCKSPHRDPAPRGPARFLPLPGLPPAPPEPPGILAPQPPDVGSSDPLSMVGSQGRSPSYAS

SEQ ID NO: 126 - protein, 473 aa, Artificial Sequence
  Fusion Protein
HGEGTFTSDKSKLLEKRAAHLFIEWLIAGGHSSIKPPPKGGGGGGGSGGGGSGGGGSAESKYGPPCPPCPAPEFEGGPSVFLFPPKPKDTLMISRTPEVTCVVVDVSQEDPEVQFNWYVDGVEVHNAKTKPREEQFNSTYRVVSVLTVLHQDWLNGKEYKCKVSNKGLPSSIEKTISKAKGQPREPQVYTLPPSQEEMTKNQVSLTCLVKGFYPSDIAVEWESNGQPENNYKTTPPVLDSDGSFFLYSRLTVDKSRWQEGNVFSCSVMHEALHNHYTQKSLSLSLGGGGSGSAHPIPDSSPLLQFGGQVRQRYLYTDDACQTEAHLEIREDGTVGGAADQSPESLLQLKALKPGVIQILGVKTSRFLCQRPDGALYGSLHFDPEACSFRELLLEDGYNVYQSEAHGLPLHLPGCKSPHRDPAPRGPARFLPLPGLPPAPPEPPGILAPQPPDVGSSDPLSMVGSQGRSPSYAS

SEQ ID NO: 127 - protein, 473 aa, Artificial Sequence
  Fusion Protein
HGEGTFTSDKSQLLEKRLAHLFIEWLIKGGHSSGRPPPKGGGGGGGSGGGGSGGGGSAESKYGPPCPPCPAPEFEGGPSVFLFPPKPKDTLMISRTPEVTCVVVDVSQEDPEVQFNWYVDGVEVHNAKTKPREEQFNSTYRVVSVLTVLHQDWLNGKEYKCKVSNKGLPSSIEKTISKAKGQPREPQVYTLPPSQEEMTKNQVSLTCLVKGFYPSDIAVEWESNGQPENNYKTTPPVLDSDGSFFLYSRLTVDKSRWQEGNVFSCSVMHEALHNHYTQKSLSLSLGGGGSGSAHPIPDSSPLLQFGGQVRQRYLYTDDACQTEAHLEIREDGTVGGAADQSPESLLQLKALKPGVIQILGVKTSRFLCQRPDGALYGSLHFDPEACSFRELLLEDGYNVYQSEAHGLPLHLPGCKSPHRDPAPRGPARFLPLPGLPPAPPEPPGILAPQPPDVGSSDPLSMVGSQGRSPSYAS

SEQ ID NO: 128 - protein, 473 aa, Artificial Sequence
  Fusion Protein
HGEGTFTSDKSQLLEKRLAHLFIEWLIKGGHSKGKYPPKGGGGGGGSGGGGSGGGGSAESKYGPPCPPCPAPEFEGGPSVFLFPPKPKDTLMISRTPEVTCVVVDVSQEDPEVQFNWYVDGVEVHNAKTKPREEQFNSTYRVVSVLTVLHQDWLNGKEYKCKVSNKGLPSSIEKTISKAKGQPREPQVYTLPPSQEEMTKNQVSLTCLVKGFYPSDIAVEWESNGQPENNYKTTPPVLDSDGSFFLYSRLTVDKSRWQEGNVFSCSVMHEALHNHYTQKSLSLSLGGGGSGSAHPIPDSSPLLQFGGQVRQRYLYTDDACQTEAHLEIREDGTVGGAADQSPESLLQLKALKPGVIQILGVKTSRFLCQRPDGALYGSLHFDPEACSFRELLLEDGYNVYQSEAHGLPLHLPGCKSPHRDPAPRGPARFLPLPGLPPAPPEPPGILAPQPPDVGSSDPLSMVGSQGRSPSYAS

SEQ ID NO: 129 - protein, 473 aa, Artificial Sequence
  Fusion Protein
HGEGTFTSDKSQLLEERLAHLFIEWLIAGGHSKQKPPPKGGGGGGGSGGGGSGGGGSAESKYGPPCPPCPAPEFEGGPSVFLFPPKPKDTLMISRTPEVTCVVVDVSQEDPEVQFNWYVDGVEVHNAKTKPREEQFNSTYRVVSVLTVLHQDWLNGKEYKCKVSNKGLPSSIEKTISKAKGQPREPQVYTLPPSQEEMTKNQVSLTCLVKGFYPSDIAVEWESNGQPENNYKTTPPVLDSDGSFFLYSRLTVDKSRWQEGNVFSCSVMHEALHNHYTQKSLSLSLGGGGSGSAHPIPDSSPLLQFGGQVRQRYLYTDDACQTEAHLEIREDGTVGGAADQSPESLLQLKALKPGVIQILGVKTSRFLCQRPDGALYGSLHFDPEACSFRELLLEDGYNVYQSEAHGLPLHLPGCKSPHRDPAPRGPARFLPLPGLPPAPPEPPGILAPQPPDVGSSDPLSMVGSQGRSPSYAS

SEQ ID NO: 130 - protein, 473 aa, Artificial Sequence
  Fusion Protein
HGEGTFTSDKSQLLEKELAHLFIEWLLAGGHSKGKPPPKGGGGGGGSGGGGSGGGGSAESKYGPPCPPCPAPEFEGGPSVFLFPPKPKDTLMISRTPEVTCVVVDVSQEDPEVQFNWYVDGVEVHNAKTKPREEQFNSTYRVVSVLTVLHQDWLNGKEYKCKVSNKGLPSSIEKTISKAKGQPREPQVYTLPPSQEEMTKNQVSLTCLVKGFYPSDIAVEWESNGQPENNYKTTPPVLDSDGSFFLYSRLTVDKSRWQEGNVFSCSVMHEALHNHYTQKSLSLSLGGGGSGSAHPIPDSSPLLQFGGQVRQRYLYTDDACQTEAHLEIREDGTVGGAADQSPESLLQLKALKPGVIQILGVKTSRFLCQRPDGALYGSLHFDPEACSFRELLLEDGYNVYQSEAHGLPLHLPGCKSPHRDPAPRGPARFLPLPGLPPAPPEPPGILAPQPPDVGSSDPLSMVGSQGRSPSYAS

SEQ ID NO: 131 - protein, 473 aa, Artificial Sequence
  Fusion Protein
HGEGTFTSDKSQLLEKELAHLFIEWLIAGGHSKQKPPPKGGGGGGGSGGGGSGGGGSAESKYGPPCPPCPAPEFEGGPSVFLFPPKPKDTLMISRTPEVTCVVVDVSQEDPEVQFNWYVDGVEVHNAKTKPREEQFNSTYRVVSVLTVLHQDWLNGKEYKCKVSNKGLPSSIEKTISKAKGQPREPQVYTLPPSQEEMTKNQVSLTCLVKGFYPSDIAVEWESNGQPENNYKTTPPVLDSDGSFFLYSRLTVDKSRWQEGNVFSCSVMHEALHNHYTQKSLSLSLGGGGSGSAHPIPDSSPLLQFGGQVRQRYLYTDDACQTEAHLEIREDGTVGGAADQSPESLLQLKALKPGVIQILGVKTSRFLCQRPDGALYGSLHFDPEACSFRELLLEDGYNVYQSEAHGLPLHLPGCKSPHRDPAPRGPARFLPLPGLPPAPPEPPGILAPQPPDVGSSDPLSMVGSQGRSPSYAS

SEQ ID NO: 132 - protein, 473 aa, Artificial Sequence
  Fusion Protein
HGEGTFTSDKSQLLEKRLAHLFIEWLLAGGHSSGKLSPKGGGGGGGSGGGGSGGGGSAESKYGPPCPPCPAPEFEGGPSVFLFPPKPKDTLMISRTPEVTCVVVDVSQEDPEVQFNWYVDGVEVHNAKTKPREEQFNSTYRVVSVLTVLHQDWLNGKEYKCKVSNKGLPSSIEKTISKAKGQPREPQVYTLPPSQEEMTKNQVSLTCLVKGFYPSDIAVEWESNGQPENNYKTTPPVLDSDGSFFLYSRLTVDKSRWQEGNVFSCSVMHEALHNHYTQKSLSLSLGGGGSGSAHPIPDSSPLLQFGGQVRQRYLYTDDACQTEAHLEIREDGTVGGAADQSPESLLQLKALKPGVIQILGVKTSRFLCQRPDGALYGSLHFDPEACSFRELLLEDGYNVYQSEAHGLPLHLPGCKSPHRDPAPRGPARFLPLPGLPPAPPEPPGILAPQPPDVGSSDPLSMVGSQGRSPSYAS

SEQ ID NO: 133 - protein, 473 aa, Artificial Sequence
  Fusion Protein
HGEGTFTSDKSQLLEKRLAHLFIEWLIKGGHSKQKPPPKGGGGGGGSGGGGSGGGGSAESKYGPPCPPCPAPEFEGGPSVFLFPPKPKDTLMISRTPEVTCVVVDVSQEDPEVQFNWYVDGVEVHNAKTKPREEQFNSTYRVVSVLTVLHQDWLNGKEYKCKVSNKGLPSSIEKTISKAKGQPREPQVYTLPPSQEEMTKNQVSLTCLVKGFYPSDIAVEWESNGQPENNYKTTPPVLDSDGSFFLYSRLTVDKSRWQEGNVFSCSVMHEALHNHYTQKSLSLSLGGGGSGSAHPIPDSSPLLQFGGQVRQRYLYTDDACQTEAHLEIREDGTVGGAADQSPESLLQLKALKPGVIQILGVKTSRFLCQRPDGALYGSLHFDPEACSFRELLLEDGYNVYQSEAHGLPLHLPGCKSPHRDPAPRGPARFLPLPGLPPAPPEPPGILAPQPPDVGSSDPLSMVGSQGRSPSYAS

SEQ ID NO: 134 - protein, 473 aa, Artificial Sequence
  Fusion Protein
HGEGTFTSDKSKLLEKRLAHLFIEWLIKGGHKSGKPPPKGGGGGGGSGGGGSGGGGSAESKYGPPCPPCPAPEFEGGPSVFLFPPKPKDTLMISRTPEVTCVVVDVSQEDPEVQFNWYVDGVEVHNAKTKPREEQFNSTYRVVSVLTVLHQDWLNGKEYKCKVSNKGLPSSIEKTISKAKGQPREPQVYTLPPSQEEMTKNQVSLTCLVKGFYPSDIAVEWESNGQPENNYKTTPPVLDSDGSFFLYSRLTVDKSRWQEGNVFSCSVMHEALHNHYTQKSLSLSLGGGGSGSAHPIPDSSPLLQFGGQVRQRYLYTDDACQTEAHLEIREDGTVGGAADQSPESLLQLKALKPGVIQILGVKTSRFLCQRPDGALYGSLHFDPEACSFRELLLEDGYNVYQSEAHGLPLHLPGCKSPHRDPAPRGPARFLPLPGLPPAPPEPPGILAPQPPDVGSSDPLSMVGSQGRSPSYAS

SEQ ID NO: 135 - protein, 473 aa, Artificial Sequence
  Fusion Protein
HGEGTFTSDKSQLLEERLVHLFIEWLIAGGHSSGKLPPKGGGGGGGSGGGGSGGGGSAESKYGPPCPPCPAPEFEGGPSVFLFPPKPKDTLMISRTPEVTCVVVDVSQEDPEVQFNWYVDGVEVHNAKTKPREEQFNSTYRVVSVLTVLHQDWLNGKEYKCKVSNKGLPSSIEKTISKAKGQPREPQVYTLPPSQEEMTKNQVSLTCLVKGFYPSDIAVEWESNGQPENNYKTTPPVLDSDGSFFLYSRLTVDKSRWQEGNVFSCSVMHEALHNHYTQKSLSLSLGGGGSGSAHPIPDSSPLLQFGGQVRQRYLYTDDACQTEAHLEIREDGTVGGAADQSPESLLQLKALKPGVIQILGVKTSRFLCQRPDGALYGSLHFDPEACSFRELLLEDGYNVYQSEAHGLPLHLPGCKSPHRDPAPRGPARFLPLPGLPPAPPEPPGILAPQPPDVGSSDPLSMVGSQGRSPSYAS

SEQ ID NO: 136 - protein, 473 aa, Artificial Sequence
  Fusion Protein
HGEGTFTSDKSKLLEKRLAHLFIEWLLAGGHSKGKPPPKGGGGGGGSGGGGSGGGGSAESKYGPPCPPCPAPEFEGGPSVFLFPPKPKDTLMISRTPEVTCVVVDVSQEDPEVQFNWYVDGVEVHNAKTKPREEQFNSTYRVVSVLTVLHQDWLNGKEYKCKVSNKGLPSSIEKTISKAKGQPREPQVYTLPPSQEEMTKNQVSLTCLVKGFYPSDIAVEWESNGQPENNYKTTPPVLDSDGSFFLYSRLTVDKSRWQEGNVFSCSVMHEALHNHYTQKSLSLSLGGGGSGSAHPIPDSSPLLQFGGQVRQRYLYTDDACQTEAHLEIREDGTVGGAADQSPESLLQLKALKPGVIQILGVKTSRFLCQRPDGALYGSLHFDPEACSFRELLLEDGYNVYQSEAHGLPLHLPGCKSPHRDPAPRGPARFLPLPGLPPAPPEPPGILAPQPPDVGSSDPLSMVGSQGRSPSYAS

SEQ ID NO: 137 - protein, 473 aa, Artificial Sequence
  Fusion Protein
HGEGTFTSDKSQLLEKRAAHLFIEWLLAGGHSSIKPPPKGGGGGGGSGGGGSGGGGSAESKYGPPCPPCPAPEFEGGPSVFLFPPKPKDTLMISRTPEVTCVVVDVSQEDPEVQFNWYVDGVEVHNAKTKPREEQFNSTYRVVSVLTVLHQDWLNGKEYKCKVSNKGLPSSIEKTISKAKGQPREPQVYTLPPSQEEMTKNQVSLTCLVKGFYPSDIAVEWESNGQPENNYKTTPPVLDSDGSFFLYSRLTVDKSRWQEGNVFSCSVMHEALHNHYTQKSLSLSLGGGGSGSAHPIPDSSPLLQFGGQVRQRYLYTDDACQTEAHLEIREDGTVGGAADQSPESLLQLKALKPGVIQILGVKTSRFLCQRPDGALYGSLHFDPEACSFRELLLEDGYNVYQSEAHGLPLHLPGCKSPHRDPAPRGPARFLPLPGLPPAPPEPPGILAPQPPDVGSSDPLSMVGSQGRSPSYAS

SEQ ID NO: 138 - protein, 473 aa, Artificial Sequence
  Fusion Protein
HGEGTFTSDKSQLLEKELAHLFIEWLIAGGHSSIRPPPKGGGGGGGSGGGGSGGGGSAESKYGPPCPPCPAPEFEGGPSVFLFPPKPKDTLMISRTPEVTCVVVDVSQEDPEVQFNWYVDGVEVHNAKTKPREEQFNSTYRVVSVLTVLHQDWLNGKEYKCKVSNKGLPSSIEKTISKAKGQPREPQVYTLPPSQEEMTKNQVSLTCLVKGFYPSDIAVEWESNGQPENNYKTTPPVLDSDGSFFLYSRLTVDKSRWQEGNVFSCSVMHEALHNHYTQKSLSLSLGGGGSGSAHPIPDSSPLLQFGGQVRQRYLYTDDACQTEAHLEIREDGTVGGAADQSPESLLQLKALKPGVIQILGVKTSRFLCQRPDGALYGSLHFDPEACSFRELLLEDGYNVYQSEAHGLPLHLPGCKSPHRDPAPRGPARFLPLPGLPPAPPEPPGILAPQPPDVGSSDPLSMVGSQGRSPSYAS

SEQ ID NO: 139 - protein, 473 aa, Artificial Sequence
  Fusion Protein
HGEGTFTSDKSQLLEKRAAHLFIEWLIAGGHSSGKLSPKGGGGGGGSGGGGSGGGGSAESKYGPPCPPCPAPEFEGGPSVFLFPPKPKDTLMISRTPEVTCVVVDVSQEDPEVQFNWYVDGVEVHNAKTKPREEQFNSTYRVVSVLTVLHQDWLNGKEYKCKVSNKGLPSSIEKTISKAKGQPREPQVYTLPPSQEEMTKNQVSLTCLVKGFYPSDIAVEWESNGQPENNYKTTPPVLDSDGSFFLYSRLTVDKSRWQEGNVFSCSVMHEALHNHYTQKSLSLSLGGGGSGSAHPIPDSSPLLQFGGQVRQRYLYTDDACQTEAHLEIREDGTVGGAADQSPESLLQLKALKPGVIQILGVKTSRFLCQRPDGALYGSLHFDPEACSFRELLLEDGYNVYQSEAHGLPLHLPGCKSPHRDPAPRGPARFLPLPGLPPAPPEPPGILAPQPPDVGSSDPLSMVGSQGRSPSYAS

SEQ ID NO: 140 - protein, 473 aa, Artificial Sequence
  Fusion Protein
HGEGTFTSDKSQLLEKRLAHLFIEWLIKGGHSKGKPPPKGGGGGGGSGGGGSGGGGSAESKYGPPCPPCPAPEFEGGPSVFLFPPKPKDTLMISRTPEVTCVVVDVSQEDPEVQFNWYVDGVEVHNAKTKPREEQFNSTYRVVSVLTVLHQDWLNGKEYKCKVSNKGLPSSIEKTISKAKGQPREPQVYTLPPSQEEMTKNQVSLTCLVKGFYPSDIAVEWESNGQPENNYKTTPPVLDSDGSFFLYSRLTVDKSRWQEGNVFSCSVMHEALHNHYTQKSLSLSLGGGGSGSAHPIPDSSPLLQFGGQVRQRYLYTDDACQTEAHLEIREDGTVGGAADQSPESLLQLKALKPGVIQILGVKTSRFLCQRPDGALYGSLHFDPEACSFRELLLEDGYNVYQSEAHGLPLHLPGCKSPHRDPAPRGPARFLPLPGLPPAPPEPPGILAPQPPDVGSSDPLSMVGSQGRSPSYAS

SEQ ID NO: 141 - protein, 473 aa, Artificial Sequence
  Fusion Protein
HGEGTFTSDKSKLLEKRAAHLFIEWLIAGGHSKGKPPPKGGGGGGGSGGGGSGGGGSAESKYGPPCPPCPAPEFEGGPSVFLFPPKPKDTLMISRTPEVTCVVVDVSQEDPEVQFNWYVDGVEVHNAKTKPREEQFNSTYRVVSVLTVLHQDWLNGKEYKCKVSNKGLPSSIEKTISKAKGQPREPQVYTLPPSQEEMTKNQVSLTCLVKGFYPSDIAVEWESNGQPENNYKTTPPVLDSDGSFFLYSRLTVDKSRWQEGNVFSCSVMHEALHNHYTQKSLSLSLGGGGSGSAHPIPDSSPLLQFGGQVRQRYLYTDDACQTEAHLEIREDGTVGGAADQSPESLLQLKALKPGVIQILGVKTSRFLCQRPDGALYGSLHFDPEACSFRELLLEDGYNVYQSEAHGLPLHLPGCKSPHRDPAPRGPARFLPLPGLPPAPPEPPGILAPQPPDVGSSDPLSMVGSQGRSPSYAS

SEQ ID NO: 142 - protein, 473 aa, Artificial Sequence
  Fusion Protein
HGEGTFTSDKSQLLEKRLAHLFIEWLIAGGHKSGKYSPKGGGGGGGSGGGGSGGGGSAESKYGPPCPPCPAPEFEGGPSVFLFPPKPKDTLMISRTPEVTCVVVDVSQEDPEVQFNWYVDGVEVHNAKTKPREEQFNSTYRVVSVLTVLHQDWLNGKEYKCKVSNKGLPSSIEKTISKAKGQPREPQVYTLPPSQEEMTKNQVSLTCLVKGFYPSDIAVEWESNGQPENNYKTTPPVLDSDGSFFLYSRLTVDKSRWQEGNVFSCSVMHEALHNHYTQKSLSLSLGGGGSGSAHPIPDSSPLLQFGGQVRQRYLYTDDACQTEAHLEIREDGTVGGAADQSPESLLQLKALKPGVIQILGVKTSRFLCQRPDGALYGSLHFDPEACSFRELLLEDGYNVYQSEAHGLPLHLPGCKSPHRDPAPRGPARFLPLPGLPPAPPEPPGILAPQPPDVGSSDPLSMVGSQGRSPSYAS

SEQ ID NO: 143 - protein, 473 aa, Artificial Sequence
  Fusion Protein
HGEGTFTSDKSQLLEKRLAHLFIEWLLKGGHSKGKPPPKGGGGGGGSGGGGSGGGGSAESKYGPPCPPCPAPEFEGGPSVFLFPPKPKDTLMISRTPEVTCVVVDVSQEDPEVQFNWYVDGVEVHNAKTKPREEQFNSTYRVVSVLTVLHQDWLNGKEYKCKVSNKGLPSSIEKTISKAKGQPREPQVYTLPPSQEEMTKNQVSLTCLVKGFYPSDIAVEWESNGQPENNYKTTPPVLDSDGSFFLYSRLTVDKSRWQEGNVFSCSVMHEALHNHYTQKSLSLSLGGGGSGSAHPIPDSSPLLQFGGQVRQRYLYTDDACQTEAHLEIREDGTVGGAADQSPESLLQLKALKPGVIQILGVKTSRFLCQRPDGALYGSLHFDPEACSFRELLLEDGYNVYQSEAHGLPLHLPGCKSPHRDPAPRGPARFLPLPGLPPAPPEPPGILAPQPPDVGSSDPLSMVGSQGRSPSYAS

SEQ ID NO: 144 - protein, 473 aa, Artificial Sequence
  Fusion Protein
HGEGTFTSDKSQLLEKRLAHLFIEWLIKGGPSSIKPPPKGGGGGGGSGGGGSGGGGSAESKYGPPCPPCPAPEFEGGPSVFLFPPKPKDTLMISRTPEVTCVVVDVSQEDPEVQFNWYVDGVEVHNAKTKPREEQFNSTYRVVSVLTVLHQDWLNGKEYKCKVSNKGLPSSIEKTISKAKGQPREPQVYTLPPSQEEMTKNQVSLTCLVKGFYPSDIAVEWESNGQPENNYKTTPPVLDSDGSFFLYSRLTVDKSRWQEGNVFSCSVMHEALHNHYTQKSLSLSLGGGGSGSAHPIPDSSPLLQFGGQVRQRYLYTDDACQTEAHLEIREDGTVGGAADQSPESLLQLKALKPGVIQILGVKTSRFLCQRPDGALYGSLHFDPEACSFRELLLEDGYNVYQSEAHGLPLHLPGCKSPHRDPAPRGPARFLPLPGLPPAPPEPPGILAPQPPDVGSSDPLSMVGSQGRSPSYAS

SEQ ID NO: 145 - protein, 473 aa, Artificial Sequence
  Fusion Protein
HGEGTFTSDKSQLLEKRLAHLFIEWLIKGGHSSIRPPPKGGGGGGGSGGGGSGGGGSAESKYGPPCPPCPAPEFEGGPSVFLFPPKPKDTLMISRTPEVTCVVVDVSQEDPEVQFNWYVDGVEVHNAKTKPREEQFNSTYRVVSVLTVLHQDWLNGKEYKCKVSNKGLPSSIEKTISKAKGQPREPQVYTLPPSQEEMTKNQVSLTCLVKGFYPSDIAVEWESNGQPENNYKTTPPVLDSDGSFFLYSRLTVDKSRWQEGNVFSCSVMHEALHNHYTQKSLSLSLGGGGSGSAHPIPDSSPLLQFGGQVRQRYLYTDDACQTEAHLEIREDGTVGGAADQSPESLLQLKALKPGVIQILGVKTSRFLCQRPDGALYGSLHFDPEACSFRELLLEDGYNVYQSEAHGLPLHLPGCKSPHRDPAPRGPARFLPLPGLPPAPPEPPGILAPQPPDVGSSDPLSMVGSQGRSPSYAS

SEQ ID NO: 146 - protein, 473 aa, Artificial Sequence
  Fusion Protein
HGEGTFTSDKSQLLEKRLAHLFIEWLLAGGHKKGKPPPKGGGGGGGSGGGGSGGGGSAESKYGPPCPPCPAPEFEGGPSVFLFPPKPKDTLMISRTPEVTCVVVDVSQEDPEVQFNWYVDGVEVHNAKTKPREEQFNSTYRVVSVLTVLHQDWLNGKEYKCKVSNKGLPSSIEKTISKAKGQPREPQVYTLPPSQEEMTKNQVSLTCLVKGFYPSDIAVEWESNGQPENNYKTTPPVLDSDGSFFLYSRLTVDKSRWQEGNVFSCSVMHEALHNHYTQKSLSLSLGGGGSGSAHPIPDSSPLLQFGGQVRQRYLYTDDACQTEAHLEIREDGTVGGAADQSPESLLQLKALKPGVIQILGVKTSRFLCQRPDGALYGSLHFDPEACSFRELLLEDGYNVYQSEAHGLPLHLPGCKSPHRDPAPRGPARFLPLPGLPPAPPEPPGILAPQPPDVGSSDPLSMVGSQGRSPSYAS

SEQ ID NO: 147 - protein, 473 aa, Artificial Sequence
  Fusion Protein
HGEGTFTSDKSQLLEKRLAHLFIEWLLKGGHSSGRPPPKGGGGGGGSGGGGSGGGGSAESKYGPPCPPCPAPEFEGGPSVFLFPPKPKDTLMISRTPEVTCVVVDVSQEDPEVQFNWYVDGVEVHNAKTKPREEQFNSTYRVVSVLTVLHQDWLNGKEYKCKVSNKGLPSSIEKTISKAKGQPREPQVYTLPPSQEEMTKNQVSLTCLVKGFYPSDIAVEWESNGQPENNYKTTPPVLDSDGSFFLYSRLTVDKSRWQEGNVFSCSVMHEALHNHYTQKSLSLSLGGGGSGSAHPIPDSSPLLQFGGQVRQRYLYTDDACQTEAHLEIREDGTVGGAADQSPESLLQLKALKPGVIQILGVKTSRFLCQRPDGALYGSLHFDPEACSFRELLLEDGYNVYQSEAHGLPLHLPGCKSPHRDPAPRGPARFLPLPGLPPAPPEPPGILAPQPPDVGSSDPLSMVGSQGRSPSYAS

SEQ ID NO: 148 - protein, 473 aa, Artificial Sequence
  Fusion Protein
HGEGTFTSDKSQLLEKRLAHLFIEWLIAGGPSSGKYSPKGGGGGGGSGGGGSGGGGSAESKYGPPCPPCPAPEFEGGPSVFLFPPKPKDTLMISRTPEVTCVVVDVSQEDPEVQFNWYVDGVEVHNAKTKPREEQFNSTYRVVSVLTVLHQDWLNGKEYKCKVSNKGLPSSIEKTISKAKGQPREPQVYTLPPSQEEMTKNQVSLTCLVKGFYPSDIAVEWESNGQPENNYKTTPPVLDSDGSFFLYSRLTVDKSRWQEGNVFSCSVMHEALHNHYTQKSLSLSLGGGGSGSAHPIPDSSPLLQFGGQVRQRYLYTDDACQTEAHLEIREDGTVGGAADQSPESLLQLKALKPGVIQILGVKTSRFLCQRPDGALYGSLHFDPEACSFRELLLEDGYNVYQSEAHGLPLHLPGCKSPHRDPAPRGPARFLPLPGLPPAPPEPPGILAPQPPDVGSSDPLSMVGSQGRSPSYAS

SEQ ID NO: 149 - protein, 473 aa, Artificial Sequence
  Fusion Protein
HGEGTFTSDKSQLLEKRAAHLFIEWLIAGGPSSGKLPPKGGGGGGGSGGGGSGGGGSAESKYGPPCPPCPAPEFEGGPSVFLFPPKPKDTLMISRTPEVTCVVVDVSQEDPEVQFNWYVDGVEVHNAKTKPREEQFNSTYRVVSVLTVLHQDWLNGKEYKCKVSNKGLPSSIEKTISKAKGQPREPQVYTLPPSQEEMTKNQVSLTCLVKGFYPSDIAVEWESNGQPENNYKTTPPVLDSDGSFFLYSRLTVDKSRWQEGNVFSCSVMHEALHNHYTQKSLSLSLGGGGSGSAHPIPDSSPLLQFGGQVRQRYLYTDDACQTEAHLEIREDGTVGGAADQSPESLLQLKALKPGVIQILGVKTSRFLCQRPDGALYGSLHFDPEACSFRELLLEDGYNVYQSEAHGLPLHLPGCKSPHRDPAPRGPARFLPLPGLPPAPPEPPGILAPQPPDVGSSDPLSMVGSQGRSPSYAS

SEQ ID NO: 150 - protein, 473 aa, Artificial Sequence
  Fusion Protein
HGEGTFTSDKSQLLEKELAHLFIEWLIAGGHSKGRPPPKGGGGGGGSGGGGSGGGGSAESKYGPPCPPCPAPEFEGGPSVFLFPPKPKDTLMISRTPEVTCVVVDVSQEDPEVQFNWYVDGVEVHNAKTKPREEQFNSTYRVVSVLTVLHQDWLNGKEYKCKVSNKGLPSSIEKTISKAKGQPREPQVYTLPPSQEEMTKNQVSLTCLVKGFYPSDIAVEWESNGQPENNYKTTPPVLDSDGSFFLYSRLTVDKSRWQEGNVFSCSVMHEALHNHYTQKSLSLSLGGGGSGSAHPIPDSSPLLQFGGQVRQRYLYTDDACQTEAHLEIREDGTVGGAADQSPESLLQLKALKPGVIQILGVKTSRFLCQRPDGALYGSLHFDPEACSFRELLLEDGYNVYQSEAHGLPLHLPGCKSPHRDPAPRGPARFLPLPGLPPAPPEPPGILAPQPPDVGSSDPLSMVGSQGRSPSYAS

SEQ ID NO: 151 - protein, 473 aa, Artificial Sequence
  Fusion Protein
HGEGTFTSDKSQLLEKRLAHLFIEWLIAGGHSSGRYSPKGGGGGGGSGGGGSGGGGSAESKYGPPCPPCPAPEFEGGPSVFLFPPKPKDTLMISRTPEVTCVVVDVSQEDPEVQFNWYVDGVEVHNAKTKPREEQFNSTYRVVSVLTVLHQDWLNGKEYKCKVSNKGLPSSIEKTISKAKGQPREPQVYTLPPSQEEMTKNQVSLTCLVKGFYPSDIAVEWESNGQPENNYKTTPPVLDSDGSFFLYSRLTVDKSRWQEGNVFSCSVMHEALHNHYTQKSLSLSLGGGGSGSAHPIPDSSPLLQFGGQVRQRYLYTDDACQTEAHLEIREDGTVGGAADQSPESLLQLKALKPGVIQILGVKTSRFLCQRPDGALYGSLHFDPEACSFRELLLEDGYNVYQSEAHGLPLHLPGCKSPHRDPAPRGPARFLPLPGLPPAPPEPPGILAPQPPDVGSSDPLSMVGSQGRSPSYAS

SEQ ID NO: 152 - protein, 473 aa, Artificial Sequence
  Fusion Protein
HGEGTFTSDKSQLLEKRLAHLFIEWLLAGGHSSIRPPPKGGGGGGGSGGGGSGGGGSAESKYGPPCPPCPAPEFEGGPSVFLFPPKPKDTLMISRTPEVTCVVVDVSQEDPEVQFNWYVDGVEVHNAKTKPREEQFNSTYRVVSVLTVLHQDWLNGKEYKCKVSNKGLPSSIEKTISKAKGQPREPQVYTLPPSQEEMTKNQVSLTCLVKGFYPSDIAVEWESNGQPENNYKTTPPVLDSDGSFFLYSRLTVDKSRWQEGNVFSCSVMHEALHNHYTQKSLSLSLGGGGSGSAHPIPDSSPLLQFGGQVRQRYLYTDDACQTEAHLEIREDGTVGGAADQSPESLLQLKALKPGVIQILGVKTSRFLCQRPDGALYGSLHFDPEACSFRELLLEDGYNVYQSEAHGLPLHLPGCKSPHRDPAPRGPARFLPLPGLPPAPPEPPGILAPQPPDVGSSDPLSMVGSQGRSPSYAS

SEQ ID NO: 153 - protein, 473 aa, Artificial Sequence
  Fusion Protein
HGEGTFTSDKSQLLEKRLAHLFIEWLLAGGHSSIKPPPKGGGGGGGSGGGGSGGGGSAESKYGPPCPPCPAPEFEGGPSVFLFPPKPKDTLMISRTPEVTCVVVDVSQEDPEVQFNWYVDGVEVHNAKTKPREEQFNSTYRVVSVLTVLHQDWLNGKEYKCKVSNKGLPSSIEKTISKAKGQPREPQVYTLPPSQEEMTKNQVSLTCLVKGFYPSDIAVEWESNGQPENNYKTTPPVLDSDGSFFLYSRLTVDKSRWQEGNVFSCSVMHEALHNHYTQKSLSLSLGGGGSGSAHPIPDSSPLLQFGGQVRQRYLYTDDACQTEAHLEIREDGTVGGAADQSPESLLQLKALKPGVIQILGVKTSRFLCQRPDGALYGSLHFDPEACSFRELLLEDGYNVYQSEAHGLPLHLPGCKSPHRDPAPRGPARFLPLPGLPPAPPEPPGILAPQPPDVGSSDPLSMVGSQGRSPSYAS

SEQ ID NO: 154 - protein, 473 aa, Artificial Sequence
  Fusion Protein
HGEGTFTSDKSQLLEKEAAHLFIEWLIAGGHSSIKPPPKGGGGGGGSGGGGSGGGGSAESKYGPPCPPCPAPEFEGGPSVFLFPPKPKDTLMISRTPEVTCVVVDVSQEDPEVQFNWYVDGVEVHNAKTKPREEQFNSTYRVVSVLTVLHQDWLNGKEYKCKVSNKGLPSSIEKTISKAKGQPREPQVYTLPPSQEEMTKNQVSLTCLVKGFYPSDIAVEWESNGQPENNYKTTPPVLDSDGSFFLYSRLTVDKSRWQEGNVFSCSVMHEALHNHYTQKSLSLSLGGGGSGSAHPIPDSSPLLQFGGQVRQRYLYTDDACQTEAHLEIREDGTVGGAADQSPESLLQLKALKPGVIQILGVKTSRFLCQRPDGALYGSLHFDPEACSFRELLLEDGYNVYQSEAHGLPLHLPGCKSPHRDPAPRGPARFLPLPGLPPAPPEPPGILAPQPPDVGSSDPLSMVGSQGRSPSYAS

SEQ ID NO: 155 - protein, 473 aa, Artificial Sequence
  Fusion Protein
HGEGTFTSDKSQLLEKRLAHLFIEWLIAGGHSKGRLPPKGGGGGGGSGGGGSGGGGSAESKYGPPCPPCPAPEFEGGPSVFLFPPKPKDTLMISRTPEVTCVVVDVSQEDPEVQFNWYVDGVEVHNAKTKPREEQFNSTYRVVSVLTVLHQDWLNGKEYKCKVSNKGLPSSIEKTISKAKGQPREPQVYTLPPSQEEMTKNQVSLTCLVKGFYPSDIAVEWESNGQPENNYKTTPPVLDSDGSFFLYSRLTVDKSRWQEGNVFSCSVMHEALHNHYTQKSLSLSLGGGGSGSAHPIPDSSPLLQFGGQVRQRYLYTDDACQTEAHLEIREDGTVGGAADQSPESLLQLKALKPGVIQILGVKTSRFLCQRPDGALYGSLHFDPEACSFRELLLEDGYNVYQSEAHGLPLHLPGCKSPHRDPAPRGPARFLPLPGLPPAPPEPPGILAPQPPDVGSSDPLSMVGSQGRSPSYAS

SEQ ID NO: 156 - protein, 473 aa, Artificial Sequence
  Fusion Protein
HGEGTFTSDKSQLLEKRLAHLFIEWLIAGGHSSGRLSPKGGGGGGGSGGGGSGGGGSAESKYGPPCPPCPAPEFEGGPSVFLFPPKPKDTLMISRTPEVTCVVVDVSQEDPEVQFNWYVDGVEVHNAKTKPREEQFNSTYRVVSVLTVLHQDWLNGKEYKCKVSNKGLPSSIEKTISKAKGQPREPQVYTLPPSQEEMTKNQVSLTCLVKGFYPSDIAVEWESNGQPENNYKTTPPVLDSDGSFFLYSRLTVDKSRWQEGNVFSCSVMHEALHNHYTQKSLSLSLGGGGSGSAHPIPDSSPLLQFGGQVRQRYLYTDDACQTEAHLEIREDGTVGGAADQSPESLLQLKALKPGVIQILGVKTSRFLCQRPDGALYGSLHFDPEACSFRELLLEDGYNVYQSEAHGLPLHLPGCKSPHRDPAPRGPARFLPLPGLPPAPPEPPGILAPQPPDVGSSDPLSMVGSQGRSPSYAS

SEQ ID NO: 157 - protein, 473 aa, Artificial Sequence
  Fusion Protein
HGEGTFTSDKSQLLEKRLAHLFIEWLIAGGPSKGRPPPKGGGGGGGSGGGGSGGGGSAESKYGPPCPPCPAPEFEGGPSVFLFPPKPKDTLMISRTPEVTCVVVDVSQEDPEVQFNWYVDGVEVHNAKTKPREEQFNSTYRVVSVLTVLHQDWLNGKEYKCKVSNKGLPSSIEKTISKAKGQPREPQVYTLPPSQEEMTKNQVSLTCLVKGFYPSDIAVEWESNGQPENNYKTTPPVLDSDGSFFLYSRLTVDKSRWQEGNVFSCSVMHEALHNHYTQKSLSLSLGGGGSGSAHPIPDSSPLLQFGGQVRQRYLYTDDACQTEAHLEIREDGTVGGAADQSPESLLQLKALKPGVIQILGVKTSRFLCQRPDGALYGSLHFDPEACSFRELLLEDGYNVYQSEAHGLPLHLPGCKSPHRDPAPRGPARFLPLPGLPPAPPEPPGILAPQPPDVGSSDPLSMVGSQGRSPSYAS

SEQ ID NO: 158 - protein, 473 aa, Artificial Sequence
  Fusion Protein
HGEGTFTSDKSQLLEKRLAHLFIEWLIKGGHSKGRPPPKGGGGGGGSGGGGSGGGGSAESKYGPPCPPCPAPEFEGGPSVFLFPPKPKDTLMISRTPEVTCVVVDVSQEDPEVQFNWYVDGVEVHNAKTKPREEQFNSTYRVVSVLTVLHQDWLNGKEYKCKVSNKGLPSSIEKTISKAKGQPREPQVYTLPPSQEEMTKNQVSLTCLVKGFYPSDIAVEWESNGQPENNYKTTPPVLDSDGSFFLYSRLTVDKSRWQEGNVFSCSVMHEALHNHYTQKSLSLSLGGGGSGSAHPIPDSSPLLQFGGQVRQRYLYTDDACQTEAHLEIREDGTVGGAADQSPESLLQLKALKPGVIQILGVKTSRFLCQRPDGALYGSLHFDPEACSFRELLLEDGYNVYQSEAHGLPLHLPGCKSPHRDPAPRGPARFLPLPGLPPAPPEPPGILAPQPPDVGSSDPLSMVGSQGRSPSYAS

SEQ ID NO: 159 - protein, 473 aa, Artificial Sequence
  Fusion Protein
HGEGTFTSDKSQLLEKRAAHLFIEWLIAGGHKKGKPPPKGGGGGGGSGGGGSGGGGSAESKYGPPCPPCPAPEFEGGPSVFLFPPKPKDTLMISRTPEVTCVVVDVSQEDPEVQFNWYVDGVEVHNAKTKPREEQFNSTYRVVSVLTVLHQDWLNGKEYKCKVSNKGLPSSIEKTISKAKGQPREPQVYTLPPSQEEMTKNQVSLTCLVKGFYPSDIAVEWESNGQPENNYKTTPPVLDSDGSFFLYSRLTVDKSRWQEGNVFSCSVMHEALHNHYTQKSLSLSLGGGGSGSAHPIPDSSPLLQFGGQVRQRYLYTDDACQTEAHLEIREDGTVGGAADQSPESLLQLKALKPGVIQILGVKTSRFLCQRPDGALYGSLHFDPEACSFRELLLEDGYNVYQSEAHGLPLHLPGCKSPHRDPAPRGPARFLPLPGLPPAPPEPPGILAPQPPDVGSSDPLSMVGSQGRSPSYAS

SEQ ID NO: 160 - protein, 473 aa, Artificial Sequence
  Fusion Protein
HGEGTFTSDKSQLLEKRAAHLFIEWLIAGGHSSGRYPPKGGGGGGGSGGGGSGGGGSAESKYGPPCPPCPAPEFEGGPSVFLFPPKPKDTLMISRTPEVTCVVVDVSQEDPEVQFNWYVDGVEVHNAKTKPREEQFNSTYRVVSVLTVLHQDWLNGKEYKCKVSNKGLPSSIEKTISKAKGQPREPQVYTLPPSQEEMTKNQVSLTCLVKGFYPSDIAVEWESNGQPENNYKTTPPVLDSDGSFFLYSRLTVDKSRWQEGNVFSCSVMHEALHNHYTQKSLSLSLGGGGSGSAHPIPDSSPLLQFGGQVRQRYLYTDDACQTEAHLEIREDGTVGGAADQSPESLLQLKALKPGVIQILGVKTSRFLCQRPDGALYGSLHFDPEACSFRELLLEDGYNVYQSEAHGLPLHLPGCKSPHRDPAPRGPARFLPLPGLPPAPPEPPGILAPQPPDVGSSDPLSMVGSQGRSPSYAS

SEQ ID NO: 161 - protein, 473 aa, Artificial Sequence
  Fusion Protein
HGEGTFTSDKSKQLAKRLVRLFIEWLIAGGHSSGKPPPKGGGGGGGSGGGGSGGGGSAESKYGPPCPPCPAPEFEGGPSVFLFPPKPKDTLMISRTPEVTCVVVDVSQEDPEVQFNWYVDGVEVHNAKTKPREEQFNSTYRVVSVLTVLHQDWLNGKEYKCKVSNKGLPSSIEKTISKAKGQPREPQVYTLPPSQEEMTKNQVSLTCLVKGFYPSDIAVEWESNGQPENNYKTTPPVLDSDGSFFLYSRLTVDKSRWQEGNVFSCSVMHEALHNHYTQKSLSLSLGGGGSGSAHPIPDSSPLLQFGGQVRQRYLYTDDACQTEAHLEIREDGTVGGAADQSPESLLQLKALKPGVIQILGVKTSRFLCQRPDGALYGSLHFDPEACSFRELLLEDGYNVYQSEAHGLPLHLPGCKSPHRDPAPRGPARFLPLPGLPPAPPEPPGILAPQPPDVGSSDPLSMVGSQGRSPSYAS

SEQ ID NO: 162 - protein, 473 aa, Artificial Sequence
  Fusion Protein
HGEGTFTSDKSKQLAKRLAHLFIEWLIAGGHSSGKPPPKGGGGGGGSGGGGSGGGGSAESKYGPPCPPCPAPEFEGGPSVFLFPPKPKDTLMISRTPEVTCVVVDVSQEDPEVQFNWYVDGVEVHNAKTKPREEQFNSTYRVVSVLTVLHQDWLNGKEYKCKVSNKGLPSSIEKTISKAKGQPREPQVYTLPPSQEEMTKNQVSLTCLVKGFYPSDIAVEWESNGQPENNYKTTPPVLDSDGSFFLYSRLTVDKSRWQEGNVFSCSVMHEALHNHYTQKSLSLSLGGGGSGSAHPIPDSSPLLQFGGQVRQRYLYTDDACQTEAHLEIREDGTVGGAADQSPESLLQLKALKPGVIQILGVKTSRFLCQRPDGALYGSLHFDPEACSFRELLLEDGYNVYQSEAHGLPLHLPGCKSPHRDPAPRGPARFLPLPGLPPAPPEPPGILAPQPPDVGSSDPLSMVGSQGRSPSYAS

SEQ ID NO: 163 - protein, 471 aa, Artificial Sequence
  Fusion Protein
HGEGTFTSDKSKQLAEEAVQLFIEWLLAGGPSKEIISGGGGGGGSGGGGSGGGGSAESKYGPPCPPCPAPEFEGGPSVFLFPPKPKDTLMISRTPEVTCVVVDVSQEDPEVQFNWYVDGVEVHNAKTKPREEQFNSTYRVVSVLTVLHQDWLNGKEYKCKVSNKGLPSSIEKTISKAKGQPREPQVYTLPPSQEEMTKNQVSLTCLVKGFYPSDIAVEWESNGQPENNYKTTPPVLDSDGSFFLYSRLTVDKSRWQEGNVFSCSVMHEALHNHYTQKSLSLSLGGGGSGSAHPIPDSSPLLQFGGQVRQRYLYTDDACQTEAHLEIREDGTVGGAADQSPESLLQLKALKPGVIQILGVKTSRFLCQRPDGALYGSLHFDPEACSFRELLLEDGYNVYQSEAHGLPLHLPGCKSPHRDPAPRGPARFLPLPGLPPAPPEPPGILAPQPPDVGSSDPLSMVGSQGRSPSYAS

SEQ ID NO: 164 - protein, 473 aa, Artificial Sequence
  Fusion Protein
HSEGTFTSDKSKQLAKRLVRLFIEWLIKGGHSSGKPPPKGGGGGGGSGGGGSGGGGSAESKYGPPCPPCPAPEFEGGPSVFLFPPKPKDTLMISRTPEVTCVVVDVSQEDPEVQFNWYVDGVEVHNAKTKPREEQFNSTYRVVSVLTVLHQDWLNGKEYKCKVSNKGLPSSIEKTISKAKGQPREPQVYTLPPSQEEMTKNQVSLTCLVKGFYPSDIAVEWESNGQPENNYKTTPPVLDSDGSFFLYSRLTVDKSRWQEGNVFSCSVMHEALHNHYTQKSLSLSLGGGGSGSAHPIPDSSPLLQFGGQVRQRYLYTDDACQTEAHLEIREDGTVGGAADQSPESLLQLKALKPGVIQILGVKTSRFLCQRPDGALYGSLHFDPEACSFRELLLEDGYNVYQSEAHGLPLHLPGCKSPHRDPAPRGPARFLPLPGLPPAPPEPPGILAPQPPDVGSSDPLSMVGSQGRSPSYAS

SEQ ID NO: 165 - protein, 473 aa, Artificial Sequence
  Fusion Protein
HGEGTFTSDLSKQLAKRLVRLFIEWLIKGGHSSGKPPPKGGGGGGGSGGGGSGGGGSAESKYGPPCPPCPAPEFEGGPSVFLFPPKPKDTLMISRTPEVTCVVVDVSQEDPEVQFNWYVDGVEVHNAKTKPREEQFNSTYRVVSVLTVLHQDWLNGKEYKCKVSNKGLPSSIEKTISKAKGQPREPQVYTLPPSQEEMTKNQVSLTCLVKGFYPSDIAVEWESNGQPENNYKTTPPVLDSDGSFFLYSRLTVDKSRWQEGNVFSCSVMHEALHNHYTQKSLSLSLGGGGSGSAHPIPDSSPLLQFGGQVRQRYLYTDDACQTEAHLEIREDGTVGGAADQSPESLLQLKALKPGVIQILGVKTSRFLCQRPDGALYGSLHFDPEACSFRELLLEDGYNVYQSEAHGLPLHLPGCKSPHRDPAPRGPARFLPLPGLPPAPPEPPGILAPQPPDVGSSDPLSMVGSQGRSPSYAS

SEQ ID NO: 166 - protein, 473 aa, Artificial Sequence
  Fusion Protein
HGEGTFTSDKSKQLAKRLVREFIEWLIKGGHSSGKPPPKGGGGGGGSGGGGSGGGGSAESKYGPPCPPCPAPEFEGGPSVFLFPPKPKDTLMISRTPEVTCVVVDVSQEDPEVQFNWYVDGVEVHNAKTKPREEQFNSTYRVVSVLTVLHQDWLNGKEYKCKVSNKGLPSSIEKTISKAKGQPREPQVYTLPPSQEEMTKNQVSLTCLVKGFYPSDIAVEWESNGQPENNYKTTPPVLDSDGSFFLYSRLTVDKSRWQEGNVFSCSVMHEALHNHYTQKSLSLSLGGGGSGSAHPIPDSSPLLQFGGQVRQRYLYTDDACQTEAHLEIREDGTVGGAADQSPESLLQLKALKPGVIQILGVKTSRFLCQRPDGALYGSLHFDPEACSFRELLLEDGYNVYQSEAHGLPLHLPGCKSPHRDPAPRGPARFLPLPGLPPAPPEPPGILAPQPPDVGSSDPLSMVGSQGRSPSYAS

SEQ ID NO: 167 - protein, 473 aa, Artificial Sequence
  Fusion Protein
HGEGTFTSDKSKQLAKRLVRHFIEWLIKGGHSSGKPPPKGGGGGGGSGGGGSGGGGSAESKYGPPCPPCPAPEFEGGPSVFLFPPKPKDTLMISRTPEVTCVVVDVSQEDPEVQFNWYVDGVEVHNAKTKPREEQFNSTYRVVSVLTVLHQDWLNGKEYKCKVSNKGLPSSIEKTISKAKGQPREPQVYTLPPSQEEMTKNQVSLTCLVKGFYPSDIAVEWESNGQPENNYKTTPPVLDSDGSFFLYSRLTVDKSRWQEGNVFSCSVMHEALHNHYTQKSLSLSLGGGGSGSAHPIPDSSPLLQFGGQVRQRYLYTDDACQTEAHLEIREDGTVGGAADQSPESLLQLKALKPGVIQILGVKTSRFLCQRPDGALYGSLHFDPEACSFRELLLEDGYNVYQSEAHGLPLHLPGCKSPHRDPAPRGPARFLPLPGLPPAPPEPPGILAPQPPDVGSSDPLSMVGSQGRSPSYAS

SEQ ID NO: 168 - protein, 473 aa, Artificial Sequence
  Fusion Protein
HGEGTFTSDLSKQLAKRLVREFIEWLIKGGHSSGKPPPKGGGGGGGSGGGGSGGGGSAESKYGPPCPPCPAPEFEGGPSVFLFPPKPKDTLMISRTPEVTCVVVDVSQEDPEVQFNWYVDGVEVHNAKTKPREEQFNSTYRVVSVLTVLHQDWLNGKEYKCKVSNKGLPSSIEKTISKAKGQPREPQVYTLPPSQEEMTKNQVSLTCLVKGFYPSDIAVEWESNGQPENNYKTTPPVLDSDGSFFLYSRLTVDKSRWQEGNVFSCSVMHEALHNHYTQKSLSLSLGGGGSGSAHPIPDSSPLLQFGGQVRQRYLYTDDACQTEAHLEIREDGTVGGAADQSPESLLQLKALKPGVIQILGVKTSRFLCQRPDGALYGSLHFDPEACSFRELLLEDGYNVYQSEAHGLPLHLPGCKSPHRDPAPRGPARFLPLPGLPPAPPEPPGILAPQPPDVGSSDPLSMVGSQGRSPSYAS

SEQ ID NO: 169 - protein, 473 aa, Artificial Sequence
  Fusion Protein
HGEGTFTSDLSKQLAKRLVREFIEWLIEGGHSSGKPPPKGGGGGGGSGGGGSGGGGSAESKYGPPCPPCPAPEFEGGPSVFLFPPKPKDTLMISRTPEVTCVVVDVSQEDPEVQFNWYVDGVEVHNAKTKPREEQFNSTYRVVSVLTVLHQDWLNGKEYKCKVSNKGLPSSIEKTISKAKGQPREPQVYTLPPSQEEMTKNQVSLTCLVKGFYPSDIAVEWESNGQPENNYKTTPPVLDSDGSFFLYSRLTVDKSRWQEGNVFSCSVMHEALHNHYTQKSLSLSLGGGGSGSAHPIPDSSPLLQFGGQVRQRYLYTDDACQTEAHLEIREDGTVGGAADQSPESLLQLKALKPGVIQILGVKTSRFLCQRPDGALYGSLHFDPEACSFRELLLEDGYNVYQSEAHGLPLHLPGCKSPHRDPAPRGPARFLPLPGLPPAPPEPPGILAPQPPDVGSSDPLSMVGSQGRSPSYAS

SEQ ID NO: 170 - protein, 473 aa, Artificial Sequence
  Fusion Protein
HGEGTFTSDKSKQLAKRLVREFIEWLIEGGHSSGKPPPKGGGGGGGSGGGGSGGGGSAESKYGPPCPPCPAPEFEGGPSVFLFPPKPKDTLMISRTPEVTCVVVDVSQEDPEVQFNWYVDGVEVHNAKTKPREEQFNSTYRVVSVLTVLHQDWLNGKEYKCKVSNKGLPSSIEKTISKAKGQPREPQVYTLPPSQEEMTKNQVSLTCLVKGFYPSDIAVEWESNGQPENNYKTTPPVLDSDGSFFLYSRLTVDKSRWQEGNVFSCSVMHEALHNHYTQKSLSLSLGGGGSGSAHPIPDSSPLLQFGGQVRQRYLYTDDACQTEAHLEIREDGTVGGAADQSPESLLQLKALKPGVIQILGVKTSRFLCQRPDGALYGSLHFDPEACSFRELLLEDGYNVYQSEAHGLPLHLPGCKSPHRDPAPRGPARFLPLPGLPPAPPEPPGILAPQPPDVGSSDPLSMVGSQGRSPSYAS

SEQ ID NO: 171 - protein, 473 aa, Artificial Sequence
  Fusion Protein
HGEGTFTSDKSKQLAKRLVRLFIEWLIKGGPSSGAPPPSGGGGGGGSGGGGSGGGGSAESKYGPPCPPCPAPEFEGGPSVFLFPPKPKDTLMISRTPEVTCVVVDVSQEDPEVQFNWYVDGVEVHNAKTKPREEQFNSTYRVVSVLTVLHQDWLNGKEYKCKVSNKGLPSSIEKTISKAKGQPREPQVYTLPPSQEEMTKNQVSLTCLVKGFYPSDIAVEWESNGQPENNYKTTPPVLDSDGSFFLYSRLTVDKSRWQEGNVFSCSVMHEALHNHYTQKSLSLSLGGGGSGSAHPIPDSSPLLQFGGQVRQRYLYTDDACQTEAHLEIREDGTVGGAADQSPESLLQLKALKPGVIQILGVKTSRFLCQRPDGALYGSLHFDPEACSFRELLLEDGYNVYQSEAHGLPLHLPGCKSPHRDPAPRGPARFLPLPGLPPAPPEPPGILAPQPPDVGSSDPLSMVGSQGRSPSYAS

SEQ ID NO: 172 - protein, 473 aa, Artificial Sequence
  Fusion Protein
HGEGTFTSDKSKQLAKRLVRLFIEWLIKGGHSSGKPPPSGGGGGGGSGGGGSGGGGSAESKYGPPCPPCPAPEFEGGPSVFLFPPKPKDTLMISRTPEVTCVVVDVSQEDPEVQFNWYVDGVEVHNAKTKPREEQFNSTYRVVSVLTVLHQDWLNGKEYKCKVSNKGLPSSIEKTISKAKGQPREPQVYTLPPSQEEMTKNQVSLTCLVKGFYPSDIAVEWESNGQPENNYKTTPPVLDSDGSFFLYSRLTVDKSRWQEGNVFSCSVMHEALHNHYTQKSLSLSLGGGGSGSAHPIPDSSPLLQFGGQVRQRYLYTDDACQTEAHLEIREDGTVGGAADQSPESLLQLKALKPGVIQILGVKTSRFLCQRPDGALYGSLHFDPEACSFRELLLEDGYNVYQSEAHGLPLHLPGCKSPHRDPAPRGPARFLPLPGLPPAPPEPPGILAPQPPDVGSSDPLSMVGSQGRSPSYAS

SEQ ID NO: 173 - protein, 473 aa, Artificial Sequence
  Fusion Protein
HGEGTFTSDKSKQLAKRLVRLFVQWLIKGGHSSGKPPPKGGGGGGGSGGGGSGGGGSAESKYGPPCPPCPAPEFEGGPSVFLFPPKPKDTLMISRTPEVTCVVVDVSQEDPEVQFNWYVDGVEVHNAKTKPREEQFNSTYRVVSVLTVLHQDWLNGKEYKCKVSNKGLPSSIEKTISKAKGQPREPQVYTLPPSQEEMTKNQVSLTCLVKGFYPSDIAVEWESNGQPENNYKTTPPVLDSDGSFFLYSRLTVDKSRWQEGNVFSCSVMHEALHNHYTQKSLSLSLGGGGSGSAHPIPDSSPLLQFGGQVRQRYLYTDDACQTEAHLEIREDGTVGGAADQSPESLLQLKALKPGVIQILGVKTSRFLCQRPDGALYGSLHFDPEACSFRELLLEDGYNVYQSEAHGLPLHLPGCKSPHRDPAPRGPARFLPLPGLPPAPPEPPGILAPQPPDVGSSDPLSMVGSQGRSPSYAS

SEQ ID NO: 174 - protein, 473 aa, Artificial Sequence
  Fusion Protein
HGEGTFTSDLSKQLAKRLVREFIEWLIEGGPSSGAPPPSGGGGGGGSGGGGSGGGGSAESKYGPPCPPCPAPEFEGGPSVFLFPPKPKDTLMISRTPEVTCVVVDVSQEDPEVQFNWYVDGVEVHNAKTKPREEQFNSTYRVVSVLTVLHQDWLNGKEYKCKVSNKGLPSSIEKTISKAKGQPREPQVYTLPPSQEEMTKNQVSLTCLVKGFYPSDIAVEWESNGQPENNYKTTPPVLDSDGSFFLYSRLTVDKSRWQEGNVFSCSVMHEALHNHYTQKSLSLSLGGGGSGSAHPIPDSSPLLQFGGQVRQRYLYTDDACQTEAHLEIREDGTVGGAADQSPESLLQLKALKPGVIQILGVKTSRFLCQRPDGALYGSLHFDPEACSFRELLLEDGYNVYQSEAHGLPLHLPGCKSPHRDPAPRGPARFLPLPGLPPAPPEPPGILAPQPPDVGSSDPLSMVGSQGRSPSYAS

SEQ ID NO: 175 - protein, 471 aa, Artificial Sequence
  Fusion Protein
HGEGTFTSDKSKQLAKEAVQLFIEWLLAGGPKKIRYSGGGGGGGSGGGGSGGGGSAESKYGPPCPPCPAPEFEGGPSVFLFPPKPKDTLMISRTPEVTCVVVDVSQEDPEVQFNWYVDGVEVHNAKTKPREEQFNSTYRVVSVLTVLHQDWLNGKEYKCKVSNKGLPSSIEKTISKAKGQPREPQVYTLPPSQEEMTKNQVSLTCLVKGFYPSDIAVEWESNGQPENNYKTTPPVLDSDGSFFLYSRLTVDKSRWQEGNVFSCSVMHEALHNHYTQKSLSLSLGGGGSGSAHPIPDSSPLLQFGGQVRQRYLYTDDACQTEAHLEIREDGTVGGAADQSPESLLQLKALKPGVIQILGVKTSRFLCQRPDGALYGSLHFDPEACSFRELLLEDGYNVYQSEAHGLPLHLPGCKSPHRDPAPRGPARFLPLPGLPPAPPEPPGILAPQPPDVGSSDPLSMVGSQGRSPSYAS

SEQ ID NO: 176 - protein, 471 aa, Artificial Sequence
  Fusion Protein
HGEGTFTSDKSKQLAERAVQLFIEWLLAGGPKKIRYSGGGGGGGSGGGGSGGGGSAESKYGPPCPPCPAPEFEGGPSVFLFPPKPKDTLMISRTPEVTCVVVDVSQEDPEVQFNWYVDGVEVHNAKTKPREEQFNSTYRVVSVLTVLHQDWLNGKEYKCKVSNKGLPSSIEKTISKAKGQPREPQVYTLPPSQEEMTKNQVSLTCLVKGFYPSDIAVEWESNGQPENNYKTTPPVLDSDGSFFLYSRLTVDKSRWQEGNVFSCSVMHEALHNHYTQKSLSLSLGGGGSGSAHPIPDSSPLLQFGGQVRQRYLYTDDACQTEAHLEIREDGTVGGAADQSPESLLQLKALKPGVIQILGVKTSRFLCQRPDGALYGSLHFDPEACSFRELLLEDGYNVYQSEAHGLPLHLPGCKSPHRDPAPRGPARFLPLPGLPPAPPEPPGILAPQPPDVGSSDPLSMVGSQGRSPSYAS

SEQ ID NO: 177 - protein, 471 aa, Artificial Sequence
  Fusion Protein
HGEGTFTSDKSKQLAKRAVQLFIEWLLAGGPKKIRYSGGGGGGGSGGGGSGGGGSAESKYGPPCPPCPAPEFEGGPSVFLFPPKPKDTLMISRTPEVTCVVVDVSQEDPEVQFNWYVDGVEVHNAKTKPREEQFNSTYRVVSVLTVLHQDWLNGKEYKCKVSNKGLPSSIEKTISKAKGQPREPQVYTLPPSQEEMTKNQVSLTCLVKGFYPSDIAVEWESNGQPENNYKTTPPVLDSDGSFFLYSRLTVDKSRWQEGNVFSCSVMHEALHNHYTQKSLSLSLGGGGSGSAHPIPDSSPLLQFGGQVRQRYLYTDDACQTEAHLEIREDGTVGGAADQSPESLLQLKALKPGVIQILGVKTSRFLCQRPDGALYGSLHFDPEACSFRELLLEDGYNVYQSEAHGLPLHLPGCKSPHRDPAPRGPARFLPLPGLPPAPPEPPGILAPQPPDVGSSDPLSMVGSQGRSPSYAS

SEQ ID NO: 178 - protein, 471 aa, Artificial Sequence
  Fusion Protein
HGEGTFTSDKSKQLAKRLVQLFIEWLLAGGPKKIRYSGGGGGGGSGGGGSGGGGSAESKYGPPCPPCPAPEFEGGPSVFLFPPKPKDTLMISRTPEVTCVVVDVSQEDPEVQFNWYVDGVEVHNAKTKPREEQFNSTYRVVSVLTVLHQDWLNGKEYKCKVSNKGLPSSIEKTISKAKGQPREPQVYTLPPSQEEMTKNQVSLTCLVKGFYPSDIAVEWESNGQPENNYKTTPPVLDSDGSFFLYSRLTVDKSRWQEGNVFSCSVMHEALHNHYTQKSLSLSLGGGGSGSAHPIPDSSPLLQFGGQVRQRYLYTDDACQTEAHLEIREDGTVGGAADQSPESLLQLKALKPGVIQILGVKTSRFLCQRPDGALYGSLHFDPEACSFRELLLEDGYNVYQSEAHGLPLHLPGCKSPHRDPAPRGPARFLPLPGLPPAPPEPPGILAPQPPDVGSSDPLSMVGSQGRSPSYAS

SEQ ID NO: 179 - protein, 471 aa, Artificial Sequence
  Fusion Protein
HGEGTFTSDKSKQLAKELVQLFIEWLLAGGPKKIRYSGGGGGGGSGGGGSGGGGSAESKYGPPCPPCPAPEFEGGPSVFLFPPKPKDTLMISRTPEVTCVVVDVSQEDPEVQFNWYVDGVEVHNAKTKPREEQFNSTYRVVSVLTVLHQDWLNGKEYKCKVSNKGLPSSIEKTISKAKGQPREPQVYTLPPSQEEMTKNQVSLTCLVKGFYPSDIAVEWESNGQPENNYKTTPPVLDSDGSFFLYSRLTVDKSRWQEGNVFSCSVMHEALHNHYTQKSLSLSLGGGGSGSAHPIPDSSPLLQFGGQVRQRYLYTDDACQTEAHLEIREDGTVGGAADQSPESLLQLKALKPGVIQILGVKTSRFLCQRPDGALYGSLHFDPEACSFRELLLEDGYNVYQSEAHGLPLHLPGCKSPHRDPAPRGPARFLPLPGLPPAPPEPPGILAPQPPDVGSSDPLSMVGSQGRSPSYAS

SEQ ID NO: 180 - protein, 471 aa, Artificial Sequence
  Fusion Protein
HGEGTFTSDKSKQLAERLVQLFIEWLLAGGPKKIRYSGGGGGGGSGGGGSGGGGSAESKYGPPCPPCPAPEFEGGPSVFLFPPKPKDTLMISRTPEVTCVVVDVSQEDPEVQFNWYVDGVEVHNAKTKPREEQFNSTYRVVSVLTVLHQDWLNGKEYKCKVSNKGLPSSIEKTISKAKGQPREPQVYTLPPSQEEMTKNQVSLTCLVKGFYPSDIAVEWESNGQPENNYKTTPPVLDSDGSFFLYSRLTVDKSRWQEGNVFSCSVMHEALHNHYTQKSLSLSLGGGGSGSAHPIPDSSPLLQFGGQVRQRYLYTDDACQTEAHLEIREDGTVGGAADQSPESLLQLKALKPGVIQILGVKTSRFLCQRPDGALYGSLHFDPEACSFRELLLEDGYNVYQSEAHGLPLHLPGCKSPHRDPAPRGPARFLPLPGLPPAPPEPPGILAPQPPDVGSSDPLSMVGSQGRSPSYAS

SEQ ID NO: 181 - protein, 473 aa, Artificial Sequence
  Fusion Protein
HGEGTFTSDKSKQLAKRLAQEFIEWLIKGGHSSGKPPPKGGGGGGGSGGGGSGGGGSAESKYGPPCPPCPAPEFEGGPSVFLFPPKPKDTLMISRTPEVTCVVVDVSQEDPEVQFNWYVDGVEVHNAKTKPREEQFNSTYRVVSVLTVLHQDWLNGKEYKCKVSNKGLPSSIEKTISKAKGQPREPQVYTLPPSQEEMTKNQVSLTCLVKGFYPSDIAVEWESNGQPENNYKTTPPVLDSDGSFFLYSRLTVDKSRWQEGNVFSCSVMHEALHNHYTQKSLSLSLGGGGSGSAHPIPDSSPLLQFGGQVRQRYLYTDDACQTEAHLEIREDGTVGGAADQSPESLLQLKALKPGVIQILGVKTSRFLCQRPDGALYGSLHFDPEACSFRELLLEDGYNVYQSEAHGLPLHLPGCKSPHRDPAPRGPARFLPLPGLPPAPPEPPGILAPQPPDVGSSDPLSMVGSQGRSPSYAS

SEQ ID NO: 182 - protein, 473 aa, Artificial Sequence
  Fusion Protein
HGEGTFTSDKSKQLAERLVRLFIEWLIAGGHSSGKPPPKGGGGGGGSGGGGSGGGGSAESKYGPPCPPCPAPEFEGGPSVFLFPPKPKDTLMISRTPEVTCVVVDVSQEDPEVQFNWYVDGVEVHNAKTKPREEQFNSTYRVVSVLTVLHQDWLNGKEYKCKVSNKGLPSSIEKTISKAKGQPREPQVYTLPPSQEEMTKNQVSLTCLVKGFYPSDIAVEWESNGQPENNYKTTPPVLDSDGSFFLYSRLTVDKSRWQEGNVFSCSVMHEALHNHYTQKSLSLSLGGGGSGSAHPIPDSSPLLQFGGQVRQRYLYTDDACQTEAHLEIREDGTVGGAADQSPESLLQLKALKPGVIQILGVKTSRFLCQRPDGALYGSLHFDPEACSFRELLLEDGYNVYQSEAHGLPLHLPGCKSPHRDPAPRGPARFLPLPGLPPAPPEPPGILAPQPPDVGSSDPLSMVGSQGRSPSYAS

SEQ ID NO: 183 - protein, 473 aa, Artificial Sequence
  Fusion Protein
HGEGTFTSDKSKQLAERLVREFIEWLIAGGHSSGKPPPKGGGGGGGSGGGGSGGGGSAESKYGPPCPPCPAPEFEGGPSVFLFPPKPKDTLMISRTPEVTCVVVDVSQEDPEVQFNWYVDGVEVHNAKTKPREEQFNSTYRVVSVLTVLHQDWLNGKEYKCKVSNKGLPSSIEKTISKAKGQPREPQVYTLPPSQEEMTKNQVSLTCLVKGFYPSDIAVEWESNGQPENNYKTTPPVLDSDGSFFLYSRLTVDKSRWQEGNVFSCSVMHEALHNHYTQKSLSLSLGGGGSGSAHPIPDSSPLLQFGGQVRQRYLYTDDACQTEAHLEIREDGTVGGAADQSPESLLQLKALKPGVIQILGVKTSRFLCQRPDGALYGSLHFDPEACSFRELLLEDGYNVYQSEAHGLPLHLPGCKSPHRDPAPRGPARFLPLPGLPPAPPEPPGILAPQPPDVGSSDPLSMVGSQGRSPSYAS

SEQ ID NO: 184 - protein, 473 aa, Artificial Sequence
  Fusion Protein
HGEGTFTSDKSKQLAERLVKLFIEWLIAGGHSSGKPPPKGGGGGGGSGGGGSGGGGSAESKYGPPCPPCPAPEFEGGPSVFLFPPKPKDTLMISRTPEVTCVVVDVSQEDPEVQFNWYVDGVEVHNAKTKPREEQFNSTYRVVSVLTVLHQDWLNGKEYKCKVSNKGLPSSIEKTISKAKGQPREPQVYTLPPSQEEMTKNQVSLTCLVKGFYPSDIAVEWESNGQPENNYKTTPPVLDSDGSFFLYSRLTVDKSRWQEGNVFSCSVMHEALHNHYTQKSLSLSLGGGGSGSAHPIPDSSPLLQFGGQVRQRYLYTDDACQTEAHLEIREDGTVGGAADQSPESLLQLKALKPGVIQILGVKTSRFLCQRPDGALYGSLHFDPEACSFRELLLEDGYNVYQSEAHGLPLHLPGCKSPHRDPAPRGPARFLPLPGLPPAPPEPPGILAPQPPDVGSSDPLSMVGSQGRSPSYAS

SEQ ID NO: 185 - protein, 473 aa, Artificial Sequence
  Fusion Protein
HGEGTFTSDKSKQLAERLAREFIEWLIAGGHSSGKPPPKGGGGGGGSGGGGSGGGGSAESKYGPPCPPCPAPEFEGGPSVFLFPPKPKDTLMISRTPEVTCVVVDVSQEDPEVQFNWYVDGVEVHNAKTKPREEQFNSTYRVVSVLTVLHQDWLNGKEYKCKVSNKGLPSSIEKTISKAKGQPREPQVYTLPPSQEEMTKNQVSLTCLVKGFYPSDIAVEWESNGQPENNYKTTPPVLDSDGSFFLYSRLTVDKSRWQEGNVFSCSVMHEALHNHYTQKSLSLSLGGGGSGSAHPIPDSSPLLQFGGQVRQRYLYTDDACQTEAHLEIREDGTVGGAADQSPESLLQLKALKPGVIQILGVKTSRFLCQRPDGALYGSLHFDPEACSFRELLLEDGYNVYQSEAHGLPLHLPGCKSPHRDPAPRGPARFLPLPGLPPAPPEPPGILAPQPPDVGSSDPLSMVGSQGRSPSYAS

SEQ ID NO: 186 - protein, 473 aa, Artificial Sequence
  Fusion Protein
HGEGTFTSDKSKQLAERLAKLFIEWLIAGGHSSGKPPPKGGGGGGGSGGGGSGGGGSAESKYGPPCPPCPAPEFEGGPSVFLFPPKPKDTLMISRTPEVTCVVVDVSQEDPEVQFNWYVDGVEVHNAKTKPREEQFNSTYRVVSVLTVLHQDWLNGKEYKCKVSNKGLPSSIEKTISKAKGQPREPQVYTLPPSQEEMTKNQVSLTCLVKGFYPSDIAVEWESNGQPENNYKTTPPVLDSDGSFFLYSRLTVDKSRWQEGNVFSCSVMHEALHNHYTQKSLSLSLGGGGSGSAHPIPDSSPLLQFGGQVRQRYLYTDDACQTEAHLEIREDGTVGGAADQSPESLLQLKALKPGVIQILGVKTSRFLCQRPDGALYGSLHFDPEACSFRELLLEDGYNVYQSEAHGLPLHLPGCKSPHRDPAPRGPARFLPLPGLPPAPPEPPGILAPQPPDVGSSDPLSMVGSQGRSPSYAS

SEQ ID NO: 187 - protein, 473 aa, Artificial Sequence
  Fusion Protein
HGEGTFTSDLSKQLAERLVRLFIEWLIKGGHSSGKPPPKGGGGGGGSGGGGSGGGGSAESKYGPPCPPCPAPEFEGGPSVFLFPPKPKDTLMISRTPEVTCVVVDVSQEDPEVQFNWYVDGVEVHNAKTKPREEQFNSTYRVVSVLTVLHQDWLNGKEYKCKVSNKGLPSSIEKTISKAKGQPREPQVYTLPPSQEEMTKNQVSLTCLVKGFYPSDIAVEWESNGQPENNYKTTPPVLDSDGSFFLYSRLTVDKSRWQEGNVFSCSVMHEALHNHYTQKSLSLSLGGGGSGSAHPIPDSSPLLQFGGQVRQRYLYTDDACQTEAHLEIREDGTVGGAADQSPESLLQLKALKPGVIQILGVKTSRFLCQRPDGALYGSLHFDPEACSFRELLLEDGYNVYQSEAHGLPLHLPGCKSPHRDPAPRGPARFLPLPGLPPAPPEPPGILAPQPPDVGSSDPLSMVGSQGRSPSYAS

SEQ ID NO: 188 - protein, 473 aa, Artificial Sequence
  Fusion Protein
HGEGTFTSDLSIQLAKRLAQLFIEWLIKGGHSSGKPPPKGGGGGGGSGGGGSGGGGSAESKYGPPCPPCPAPEFEGGPSVFLFPPKPKDTLMISRTPEVTCVVVDVSQEDPEVQFNWYVDGVEVHNAKTKPREEQFNSTYRVVSVLTVLHQDWLNGKEYKCKVSNKGLPSSIEKTISKAKGQPREPQVYTLPPSQEEMTKNQVSLTCLVKGFYPSDIAVEWESNGQPENNYKTTPPVLDSDGSFFLYSRLTVDKSRWQEGNVFSCSVMHEALHNHYTQKSLSLSLGGGGSGSAHPIPDSSPLLQFGGQVRQRYLYTDDACQTEAHLEIREDGTVGGAADQSPESLLQLKALKPGVIQILGVKTSRFLCQRPDGALYGSLHFDPEACSFRELLLEDGYNVYQSEAHGLPLHLPGCKSPHRDPAPRGPARFLPLPGLPPAPPEPPGILAPQPPDVGSSDPLSMVGSQGRSPSYAS

SEQ ID NO: 189 - protein, 473 aa, Artificial Sequence
  Fusion Protein
HGEGTFTSDKSKQLEKELVRLFYEWLKKGGHSSIKPPPKGGGGGGGSGGGGSGGGGSAESKYGPPCPPCPAPEFEGGPSVFLFPPKPKDTLMISRTPEVTCVVVDVSQEDPEVQFNWYVDGVEVHNAKTKPREEQFNSTYRVVSVLTVLHQDWLNGKEYKCKVSNKGLPSSIEKTISKAKGQPREPQVYTLPPSQEEMTKNQVSLTCLVKGFYPSDIAVEWESNGQPENNYKTTPPVLDSDGSFFLYSRLTVDKSRWQEGNVFSCSVMHEALHNHYTQKSLSLSLGGGGSGSAHPIPDSSPLLQFGGQVRQRYLYTDDACQTEAHLEIREDGTVGGAADQSPESLLQLKALKPGVIQILGVKTSRFLCQRPDGALYGSLHFDPEACSFRELLLEDGYNVYQSEAHGLPLHLPGCKSPHRDPAPRGPARFLPLPGLPPAPPEPPGILAPQPPDVGSSDPLSMVGSQGRSPSYAS

SEQ ID NO: 190 - protein, 473 aa, Artificial Sequence
  Fusion Protein
HGEGTFTSDKSKQLEKELVRLFYEWLKAGGHSKQKPPPKGGGGGGGSGGGGSGGGGSAESKYGPPCPPCPAPEFEGGPSVFLFPPKPKDTLMISRTPEVTCVVVDVSQEDPEVQFNWYVDGVEVHNAKTKPREEQFNSTYRVVSVLTVLHQDWLNGKEYKCKVSNKGLPSSIEKTISKAKGQPREPQVYTLPPSQEEMTKNQVSLTCLVKGFYPSDIAVEWESNGQPENNYKTTPPVLDSDGSFFLYSRLTVDKSRWQEGNVFSCSVMHEALHNHYTQKSLSLSLGGGGSGSAHPIPDSSPLLQFGGQVRQRYLYTDDACQTEAHLEIREDGTVGGAADQSPESLLQLKALKPGVIQILGVKTSRFLCQRPDGALYGSLHFDPEACSFRELLLEDGYNVYQSEAHGLPLHLPGCKSPHRDPAPRGPARFLPLPGLPPAPPEPPGILAPQPPDVGSSDPLSMVGSQGRSPSYAS

SEQ ID NO: 191 - protein, 473 aa, Artificial Sequence
  Fusion Protein
HGEGTFTSDKSKQLEKELVRLFYEWLKAGGHSKIKPPPKGGGGGGGSGGGGSGGGGSAESKYGPPCPPCPAPEFEGGPSVFLFPPKPKDTLMISRTPEVTCVVVDVSQEDPEVQFNWYVDGVEVHNAKTKPREEQFNSTYRVVSVLTVLHQDWLNGKEYKCKVSNKGLPSSIEKTISKAKGQPREPQVYTLPPSQEEMTKNQVSLTCLVKGFYPSDIAVEWESNGQPENNYKTTPPVLDSDGSFFLYSRLTVDKSRWQEGNVFSCSVMHEALHNHYTQKSLSLSLGGGGSGSAHPIPDSSPLLQFGGQVRQRYLYTDDACQTEAHLEIREDGTVGGAADQSPESLLQLKALKPGVIQILGVKTSRFLCQRPDGALYGSLHFDPEACSFRELLLEDGYNVYQSEAHGLPLHLPGCKSPHRDPAPRGPARFLPLPGLPPAPPEPPGILAPQPPDVGSSDPLSMVGSQGRSPSYAS

SEQ ID NO: 192 - protein, 473 aa, Artificial Sequence
  Fusion Protein
HGEGTFTSDLSKQLEERLARLFYEWLIAGGHSSQKPPPKGGGGGGGSGGGGSGGGGSAESKYGPPCPPCPAPEFEGGPSVFLFPPKPKDTLMISRTPEVTCVVVDVSQEDPEVQFNWYVDGVEVHNAKTKPREEQFNSTYRVVSVLTVLHQDWLNGKEYKCKVSNKGLPSSIEKTISKAKGQPREPQVYTLPPSQEEMTKNQVSLTCLVKGFYPSDIAVEWESNGQPENNYKTTPPVLDSDGSFFLYSRLTVDKSRWQEGNVFSCSVMHEALHNHYTQKSLSLSLGGGGSGSAHPIPDSSPLLQFGGQVRQRYLYTDDACQTEAHLEIREDGTVGGAADQSPESLLQLKALKPGVIQILGVKTSRFLCQRPDGALYGSLHFDPEACSFRELLLEDGYNVYQSEAHGLPLHLPGCKSPHRDPAPRGPARFLPLPGLPPAPPEPPGILAPQPPDVGSSDPLSMVGSQGRSPSYAS

SEQ ID NO: 193 - protein, 473 aa, Artificial Sequence
  Fusion Protein
HGEGTFTSDLSKQLEKELVRLFYEWLINGGHSSQKPPPKGGGGGGGSGGGGSGGGGSAESKYGPPCPPCPAPEFEGGPSVFLFPPKPKDTLMISRTPEVTCVVVDVSQEDPEVQFNWYVDGVEVHNAKTKPREEQFNSTYRVVSVLTVLHQDWLNGKEYKCKVSNKGLPSSIEKTISKAKGQPREPQVYTLPPSQEEMTKNQVSLTCLVKGFYPSDIAVEWESNGQPENNYKTTPPVLDSDGSFFLYSRLTVDKSRWQEGNVFSCSVMHEALHNHYTQKSLSLSLGGGGSGSAHPIPDSSPLLQFGGQVRQRYLYTDDACQTEAHLEIREDGTVGGAADQSPESLLQLKALKPGVIQILGVKTSRFLCQRPDGALYGSLHFDPEACSFRELLLEDGYNVYQSEAHGLPLHLPGCKSPHRDPAPRGPARFLPLPGLPPAPPEPPGILAPQPPDVGSSDPLSMVGSQGRSPSYAS

SEQ ID NO: 194 - protein, 473 aa, Artificial Sequence
  Fusion Protein
HGEGTFTSDLSKQLEKELVRLFYEWLINGGHKSGKPPPKGGGGGGGSGGGGSGGGGSAESKYGPPCPPCPAPEFEGGPSVFLFPPKPKDTLMISRTPEVTCVVVDVSQEDPEVQFNWYVDGVEVHNAKTKPREEQFNSTYRVVSVLTVLHQDWLNGKEYKCKVSNKGLPSSIEKTISKAKGQPREPQVYTLPPSQEEMTKNQVSLTCLVKGFYPSDIAVEWESNGQPENNYKTTPPVLDSDGSFFLYSRLTVDKSRWQEGNVFSCSVMHEALHNHYTQKSLSLSLGGGGSGSAHPIPDSSPLLQFGGQVRQRYLYTDDACQTEAHLEIREDGTVGGAADQSPESLLQLKALKPGVIQILGVKTSRFLCQRPDGALYGSLHFDPEACSFRELLLEDGYNVYQSEAHGLPLHLPGCKSPHRDPAPRGPARFLPLPGLPPAPPEPPGILAPQPPDVGSSDPLSMVGSQGRSPSYAS

SEQ ID NO: 195 - protein, 473 aa, Artificial Sequence
  Fusion Protein
HGEGTFTSDLSKQLEKELVRLFYEWLINGGHSKGKPPPKGGGGGGGSGGGGSGGGGSAESKYGPPCPPCPAPEFEGGPSVFLFPPKPKDTLMISRTPEVTCVVVDVSQEDPEVQFNWYVDGVEVHNAKTKPREEQFNSTYRVVSVLTVLHQDWLNGKEYKCKVSNKGLPSSIEKTISKAKGQPREPQVYTLPPSQEEMTKNQVSLTCLVKGFYPSDIAVEWESNGQPENNYKTTPPVLDSDGSFFLYSRLTVDKSRWQEGNVFSCSVMHEALHNHYTQKSLSLSLGGGGSGSAHPIPDSSPLLQFGGQVRQRYLYTDDACQTEAHLEIREDGTVGGAADQSPESLLQLKALKPGVIQILGVKTSRFLCQRPDGALYGSLHFDPEACSFRELLLEDGYNVYQSEAHGLPLHLPGCKSPHRDPAPRGPARFLPLPGLPPAPPEPPGILAPQPPDVGSSDPLSMVGSQGRSPSYAS

SEQ ID NO: 196 - protein, 473 aa, Artificial Sequence
  Fusion Protein
HGEGTFTSDLSKQLEKELVRLFYEWLINGGPSSGKPPPKGGGGGGGSGGGGSGGGGSAESKYGPPCPPCPAPEFEGGPSVFLFPPKPKDTLMISRTPEVTCVVVDVSQEDPEVQFNWYVDGVEVHNAKTKPREEQFNSTYRVVSVLTVLHQDWLNGKEYKCKVSNKGLPSSIEKTISKAKGQPREPQVYTLPPSQEEMTKNQVSLTCLVKGFYPSDIAVEWESNGQPENNYKTTPPVLDSDGSFFLYSRLTVDKSRWQEGNVFSCSVMHEALHNHYTQKSLSLSLGGGGSGSAHPIPDSSPLLQFGGQVRQRYLYTDDACQTEAHLEIREDGTVGGAADQSPESLLQLKALKPGVIQILGVKTSRFLCQRPDGALYGSLHFDPEACSFRELLLEDGYNVYQSEAHGLPLHLPGCKSPHRDPAPRGPARFLPLPGLPPAPPEPPGILAPQPPDVGSSDPLSMVGSQGRSPSYAS

SEQ ID NO: 197 - protein, 473 aa, Artificial Sequence
  Fusion Protein
HGEGTFTSDLSKQLEKELVRLFYEWLINGGHSSGKPPPKGGGGGGGSGGGGSGGGGSAESKYGPPCPPCPAPEFEGGPSVFLFPPKPKDTLMISRTPEVTCVVVDVSQEDPEVQFNWYVDGVEVHNAKTKPREEQFNSTYRVVSVLTVLHQDWLNGKEYKCKVSNKGLPSSIEKTISKAKGQPREPQVYTLPPSQEEMTKNQVSLTCLVKGFYPSDIAVEWESNGQPENNYKTTPPVLDSDGSFFLYSRLTVDKSRWQEGNVFSCSVMHEALHNHYTQKSLSLSLGGGGSGSAHPIPDSSPLLQFGGQVRQRYLYTDDACQTEAHLEIREDGTVGGAADQSPESLLQLKALKPGVIQILGVKTSRFLCQRPDGALYGSLHFDPEACSFRELLLEDGYNVYQSEAHGLPLHLPGCKSPHRDPAPRGPARFLPLPGLPPAPPEPPGILAPQPPDVGSSDPLSMVGSQGRSPSYAS

SEQ ID NO: 198 - protein, 473 aa, Artificial Sequence
  Fusion Protein
HGEGTFTSDLSKQLEKELVRLFYEWLIAGGHSSQRPPPKGGGGGGGSGGGGSGGGGSAESKYGPPCPPCPAPEFEGGPSVFLFPPKPKDTLMISRTPEVTCVVVDVSQEDPEVQFNWYVDGVEVHNAKTKPREEQFNSTYRVVSVLTVLHQDWLNGKEYKCKVSNKGLPSSIEKTISKAKGQPREPQVYTLPPSQEEMTKNQVSLTCLVKGFYPSDIAVEWESNGQPENNYKTTPPVLDSDGSFFLYSRLTVDKSRWQEGNVFSCSVMHEALHNHYTQKSLSLSLGGGGSGSAHPIPDSSPLLQFGGQVRQRYLYTDDACQTEAHLEIREDGTVGGAADQSPESLLQLKALKPGVIQILGVKTSRFLCQRPDGALYGSLHFDPEACSFRELLLEDGYNVYQSEAHGLPLHLPGCKSPHRDPAPRGPARFLPLPGLPPAPPEPPGILAPQPPDVGSSDPLSMVGSQGRSPSYAS

SEQ ID NO: 199 - protein, 473 aa, Artificial Sequence
  Fusion Protein
HGEGTFTSDLSKQLEKELVRLFYEWLKAGGHSSGKPPPKGGGGGGGSGGGGSGGGGSAESKYGPPCPPCPAPEFEGGPSVFLFPPKPKDTLMISRTPEVTCVVVDVSQEDPEVQFNWYVDGVEVHNAKTKPREEQFNSTYRVVSVLTVLHQDWLNGKEYKCKVSNKGLPSSIEKTISKAKGQPREPQVYTLPPSQEEMTKNQVSLTCLVKGFYPSDIAVEWESNGQPENNYKTTPPVLDSDGSFFLYSRLTVDKSRWQEGNVFSCSVMHEALHNHYTQKSLSLSLGGGGSGSAHPIPDSSPLLQFGGQVRQRYLYTDDACQTEAHLEIREDGTVGGAADQSPESLLQLKALKPGVIQILGVKTSRFLCQRPDGALYGSLHFDPEACSFRELLLEDGYNVYQSEAHGLPLHLPGCKSPHRDPAPRGPARFLPLPGLPPAPPEPPGILAPQPPDVGSSDPLSMVGSQGRSPSYAS

SEQ ID NO: 200 - protein, 473 aa, Artificial Sequence
  Fusion Protein
HGEGTFTSDLSKQLEKELVRLFYEWLIKGGHSSGRPPPKGGGGGGGSGGGGSGGGGSAESKYGPPCPPCPAPEFEGGPSVFLFPPKPKDTLMISRTPEVTCVVVDVSQEDPEVQFNWYVDGVEVHNAKTKPREEQFNSTYRVVSVLTVLHQDWLNGKEYKCKVSNKGLPSSIEKTISKAKGQPREPQVYTLPPSQEEMTKNQVSLTCLVKGFYPSDIAVEWESNGQPENNYKTTPPVLDSDGSFFLYSRLTVDKSRWQEGNVFSCSVMHEALHNHYTQKSLSLSLGGGGSGSAHPIPDSSPLLQFGGQVRQRYLYTDDACQTEAHLEIREDGTVGGAADQSPESLLQLKALKPGVIQILGVKTSRFLCQRPDGALYGSLHFDPEACSFRELLLEDGYNVYQSEAHGLPLHLPGCKSPHRDPAPRGPARFLPLPGLPPAPPEPPGILAPQPPDVGSSDPLSMVGSQGRSPSYAS

SEQ ID NO: 201 - protein, 473 aa, Artificial Sequence
  Fusion Protein
HGEGTFTSDLSKQLEKELVRLFYEWLIKGGHSSQKPPPKGGGGGGGSGGGGSGGGGSAESKYGPPCPPCPAPEFEGGPSVFLFPPKPKDTLMISRTPEVTCVVVDVSQEDPEVQFNWYVDGVEVHNAKTKPREEQFNSTYRVVSVLTVLHQDWLNGKEYKCKVSNKGLPSSIEKTISKAKGQPREPQVYTLPPSQEEMTKNQVSLTCLVKGFYPSDIAVEWESNGQPENNYKTTPPVLDSDGSFFLYSRLTVDKSRWQEGNVFSCSVMHEALHNHYTQKSLSLSLGGGGSGSAHPIPDSSPLLQFGGQVRQRYLYTDDACQTEAHLEIREDGTVGGAADQSPESLLQLKALKPGVIQILGVKTSRFLCQRPDGALYGSLHFDPEACSFRELLLEDGYNVYQSEAHGLPLHLPGCKSPHRDPAPRGPARFLPLPGLPPAPPEPPGILAPQPPDVGSSDPLSMVGSQGRSPSYAS

SEQ ID NO: 202 - protein, 473 aa, Artificial Sequence
  Fusion Protein
HGEGTFTSDLSKQLEKELVRLFYEWLIKGGHSSIKPPPKGGGGGGGSGGGGSGGGGSAESKYGPPCPPCPAPEFEGGPSVFLFPPKPKDTLMISRTPEVTCVVVDVSQEDPEVQFNWYVDGVEVHNAKTKPREEQFNSTYRVVSVLTVLHQDWLNGKEYKCKVSNKGLPSSIEKTISKAKGQPREPQVYTLPPSQEEMTKNQVSLTCLVKGFYPSDIAVEWESNGQPENNYKTTPPVLDSDGSFFLYSRLTVDKSRWQEGNVFSCSVMHEALHNHYTQKSLSLSLGGGGSGSAHPIPDSSPLLQFGGQVRQRYLYTDDACQTEAHLEIREDGTVGGAADQSPESLLQLKALKPGVIQILGVKTSRFLCQRPDGALYGSLHFDPEACSFRELLLEDGYNVYQSEAHGLPLHLPGCKSPHRDPAPRGPARFLPLPGLPPAPPEPPGILAPQPPDVGSSDPLSMVGSQGRSPSYAS

SEQ ID NO: 203 - protein, 473 aa, Artificial Sequence
  Fusion Protein
HGEGTFTSDLSKQLEKELVRLFYEWLIKGGHKSGKPPPKGGGGGGGSGGGGSGGGGSAESKYGPPCPPCPAPEFEGGPSVFLFPPKPKDTLMISRTPEVTCVVVDVSQEDPEVQFNWYVDGVEVHNAKTKPREEQFNSTYRVVSVLTVLHQDWLNGKEYKCKVSNKGLPSSIEKTISKAKGQPREPQVYTLPPSQEEMTKNQVSLTCLVKGFYPSDIAVEWESNGQPENNYKTTPPVLDSDGSFFLYSRLTVDKSRWQEGNVFSCSVMHEALHNHYTQKSLSLSLGGGGSGSAHPIPDSSPLLQFGGQVRQRYLYTDDACQTEAHLEIREDGTVGGAADQSPESLLQLKALKPGVIQILGVKTSRFLCQRPDGALYGSLHFDPEACSFRELLLEDGYNVYQSEAHGLPLHLPGCKSPHRDPAPRGPARFLPLPGLPPAPPEPPGILAPQPPDVGSSDPLSMVGSQGRSPSYAS

SEQ ID NO: 204 - protein, 473 aa, Artificial Sequence
  Fusion Protein
HGEGTFTSDLSKQLEKELVRLFYEWLIKGGHSKGKPPPKGGGGGGGSGGGGSGGGGSAESKYGPPCPPCPAPEFEGGPSVFLFPPKPKDTLMISRTPEVTCVVVDVSQEDPEVQFNWYVDGVEVHNAKTKPREEQFNSTYRVVSVLTVLHQDWLNGKEYKCKVSNKGLPSSIEKTISKAKGQPREPQVYTLPPSQEEMTKNQVSLTCLVKGFYPSDIAVEWESNGQPENNYKTTPPVLDSDGSFFLYSRLTVDKSRWQEGNVFSCSVMHEALHNHYTQKSLSLSLGGGGSGSAHPIPDSSPLLQFGGQVRQRYLYTDDACQTEAHLEIREDGTVGGAADQSPESLLQLKALKPGVIQILGVKTSRFLCQRPDGALYGSLHFDPEACSFRELLLEDGYNVYQSEAHGLPLHLPGCKSPHRDPAPRGPARFLPLPGLPPAPPEPPGILAPQPPDVGSSDPLSMVGSQGRSPSYAS

SEQ ID NO: 205 - protein, 473 aa, Artificial Sequence
  Fusion Protein
HGEGTFTSDLSKQLEKELVRLFYEWLIAGGHKSQKPPPKGGGGGGGSGGGGSGGGGSAESKYGPPCPPCPAPEFEGGPSVFLFPPKPKDTLMISRTPEVTCVVVDVSQEDPEVQFNWYVDGVEVHNAKTKPREEQFNSTYRVVSVLTVLHQDWLNGKEYKCKVSNKGLPSSIEKTISKAKGQPREPQVYTLPPSQEEMTKNQVSLTCLVKGFYPSDIAVEWESNGQPENNYKTTPPVLDSDGSFFLYSRLTVDKSRWQEGNVFSCSVMHEALHNHYTQKSLSLSLGGGGSGSAHPIPDSSPLLQFGGQVRQRYLYTDDACQTEAHLEIREDGTVGGAADQSPESLLQLKALKPGVIQILGVKTSRFLCQRPDGALYGSLHFDPEACSFRELLLEDGYNVYQSEAHGLPLHLPGCKSPHRDPAPRGPARFLPLPGLPPAPPEPPGILAPQPPDVGSSDPLSMVGSQGRSPSYAS

SEQ ID NO: 206 - protein, 473 aa, Artificial Sequence
  Fusion Protein
HGEGTFTSDLSKQLEKRLVRLFYEWLLNGGHSSQKPPPKGGGGGGGSGGGGSGGGGSAESKYGPPCPPCPAPEFEGGPSVFLFPPKPKDTLMISRTPEVTCVVVDVSQEDPEVQFNWYVDGVEVHNAKTKPREEQFNSTYRVVSVLTVLHQDWLNGKEYKCKVSNKGLPSSIEKTISKAKGQPREPQVYTLPPSQEEMTKNQVSLTCLVKGFYPSDIAVEWESNGQPENNYKTTPPVLDSDGSFFLYSRLTVDKSRWQEGNVFSCSVMHEALHNHYTQKSLSLSLGGGGSGSAHPIPDSSPLLQFGGQVRQRYLYTDDACQTEAHLEIREDGTVGGAADQSPESLLQLKALKPGVIQILGVKTSRFLCQRPDGALYGSLHFDPEACSFRELLLEDGYNVYQSEAHGLPLHLPGCKSPHRDPAPRGPARFLPLPGLPPAPPEPPGILAPQPPDVGSSDPLSMVGSQGRSPSYAS

SEQ ID NO: 207 - protein, 473 aa, Artificial Sequence
  Fusion Protein
HGEGTFTSDLSKQLEKRLVRLFYEWLKNGGHSSGKPPPKGGGGGGGSGGGGSGGGGSAESKYGPPCPPCPAPEFEGGPSVFLFPPKPKDTLMISRTPEVTCVVVDVSQEDPEVQFNWYVDGVEVHNAKTKPREEQFNSTYRVVSVLTVLHQDWLNGKEYKCKVSNKGLPSSIEKTISKAKGQPREPQVYTLPPSQEEMTKNQVSLTCLVKGFYPSDIAVEWESNGQPENNYKTTPPVLDSDGSFFLYSRLTVDKSRWQEGNVFSCSVMHEALHNHYTQKSLSLSLGGGGSGSAHPIPDSSPLLQFGGQVRQRYLYTDDACQTEAHLEIREDGTVGGAADQSPESLLQLKALKPGVIQILGVKTSRFLCQRPDGALYGSLHFDPEACSFRELLLEDGYNVYQSEAHGLPLHLPGCKSPHRDPAPRGPARFLPLPGLPPAPPEPPGILAPQPPDVGSSDPLSMVGSQGRSPSYAS

SEQ ID NO: 208 - protein, 473 aa, Artificial Sequence
  Fusion Protein
GHGEGTFTSDKSKQLEEEAVRLFIEWLKAGGPKKIRYSGGGGGGGSGGGGSGGGGSAESKYGPPCPPCPAPEFEGGPSVFLFPPKPKDTLMISRTPEVTCVVVDVSQEDPEVQFNWYVDGVEVHNAKTKPREEQFNSTYRVVSVLTVLHQDWLNGKEYKCKVSNKGLPSSIEKTISKAKGQPREPQVYTLPPSQEEMTKNQVSLTCLVKGFYPSDIAVEWESNGQPENNYKTTPPVLDSDGSFFLYSRLTVDKSRWQEGNVFSCSVMHEALHNHYTQKSLSLSLGGGGSGSAHPIPDSSPLLQFGGQVRQRYLYTDDACQTEAHLEIREDGTVGGAADQSPESLLQLKALKPGVIQILGVKTSRFLCQRPDGALYGSLHFDPEACSFRELLLEDGYNVYQSEAHGLPLHLCGNKSPHRDPAPRGPARFLPLPGLPPAPPEPPGILAPQPPDVGSSDPLSMVYPSQGRSPSYAS

SEQ ID NO: 209 - protein, 472 aa, Artificial Sequence
  Fusion Protein
GHGEGTFTSDKSKQLEEEAVRLFIEWLKAGGPKKIRYSGGGGGGGSGGGGSGGGGSAESKYGPPCPPCPAPEFEGGPSVFLFPPKPKDTLMISRTPEVTCVVVDVSQEDPEVQFNWYVDGVEVHNAKTKPREEQFNSTYRVVSVLTVLHQDWLNGKEYKCKVSNKGLPSSIEKTISKAKGQPREPQVYTLPPSQEEMTKNQVSLTCLVKGFYPSDIAVEWESNGQPENNYKTTPPVLDSDGSFFLYSRLTVDKSRWQEGNVFSCSVMHEALHNHYTQKSLSLSLGGGGSGSAHPIPDSSPLLQFGGQVRQRYLYTDDACQTEAHLEIREDGTVGGAADQSPESLLQLKALKPGVIQILGVKTSRFLCQRPDGALYGSLHFDPEACSFRELLLEDGYNVYQSEAHGLPLHLCGNKSPHRDPAPRGPARFLPLPGLPPAPPEPPGILAPQPPDVGSSDPLSMVGSQGRSPSYAS

SEQ ID NO: 210 - protein, 472 aa, Artificial Sequence
  Fusion Protein
GHGEGTFTSDKSKQLEEEAVQLFIEWLKAGGPKKIRYSGGGGGGGSGGGGSGGGGSAESKYGPPCPPCPAPEFEGGPSVFLFPPKPKDTLMISRTPEVTCVVVDVSQEDPEVQFNWYVDGVEVHNAKTKPREEQFNSTYRVVSVLTVLHQDWLNGKEYKCKVSNKGLPSSIEKTISKAKGQPREPQVYTLPPSQEEMTKNQVSLTCLVKGFYPSDIAVEWESNGQPENNYKTTPPVLDSDGSFFLYSRLTVDKSRWQEGNVFSCSVMHEALHNHYTQKSLSLSLGGGGSGSAHPIPDSSPLLQFGGQVRQRYLYTDDACQTEAHLEIREDGTVGGAADQSPESLLQLKALKPGVIQILGVKTSRFLCQRPDGALYGSLHFDPEACSFRELLLEDGYNVYQSEAHGLPLHLPGCKSPHRDPAPRGPARFLPLPGLPPAPPEPPGILAPQPPDVGSSDPLSMVGSQGRSPSYAS

SEQ ID NO: 211 - protein, 472 aa, Artificial Sequence
  Fusion Protein
GHGEGTFTSDLSKQLEEEAVRLFIEWLKAGGPKKIRYSGGGGGGGSGGGGSGGGGSAESKYGPPCPPCPAPEFEGGPSVFLFPPKPKDTLMISRTPEVTCVVVDVSQEDPEVQFNWYVDGVEVHNAKTKPREEQFNSTYRVVSVLTVLHQDWLNGKEYKCKVSNKGLPSSIEKTISKAKGQPREPQVYTLPPSQEEMTKNQVSLTCLVKGFYPSDIAVEWESNGQPENNYKTTPPVLDSDGSFFLYSRLTVDKSRWQEGNVFSCSVMHEALHNHYTQKSLSLSLGGGGSGSAHPIPDSSPLLQFGGQVRQRYLYTDDACQTEAHLEIREDGTVGGAADQSPESLLQLKALKPGVIQILGVKTSRFLCQRPDGALYGSLHFDPEACSFRELLLEDGYNVYQSEAHGLPLHLPGCKSPHRDPAPRGPARFLPLPGLPPAPPEPPGILAPQPPDVGSSDPLSMVGSQGRSPSYAS

SEQ ID NO: 212 - protein, 472 aa, Artificial Sequence
  Fusion Protein
GHGEGTFTSDLSKQLEEEAVQLFIEWLKAGGPKKIRYSGGGGGGGSGGGGSGGGGSAESKYGPPCPPCPAPEFEGGPSVFLFPPKPKDTLMISRTPEVTCVVVDVSQEDPEVQFNWYVDGVEVHNAKTKPREEQFNSTYRVVSVLTVLHQDWLNGKEYKCKVSNKGLPSSIEKTISKAKGQPREPQVYTLPPSQEEMTKNQVSLTCLVKGFYPSDIAVEWESNGQPENNYKTTPPVLDSDGSFFLYSRLTVDKSRWQEGNVFSCSVMHEALHNHYTQKSLSLSLGGGGSGSAHPIPDSSPLLQFGGQVRQRYLYTDDACQTEAHLEIREDGTVGGAADQSPESLLQLKALKPGVIQILGVKTSRFLCQRPDGALYGSLHFDPEACSFRELLLEDGYNVYQSEAHGLPLHLPGCKSPHRDPAPRGPARFLPLPGLPPAPPEPPGILAPQPPDVGSSDPLSMVGSQGRSPSYAS

SEQ ID NO: 213 - protein, 472 aa, Artificial Sequence
  Fusion Protein
GHGEGTFTSDLSKQLEEERVRLFIEWLKAGGPKKIRYSGGGGGGGSGGGGSGGGGSAESKYGPPCPPCPAPEFEGGPSVFLFPPKPKDTLMISRTPEVTCVVVDVSQEDPEVQFNWYVDGVEVHNAKTKPREEQFNSTYRVVSVLTVLHQDWLNGKEYKCKVSNKGLPSSIEKTISKAKGQPREPQVYTLPPSQEEMTKNQVSLTCLVKGFYPSDIAVEWESNGQPENNYKTTPPVLDSDGSFFLYSRLTVDKSRWQEGNVFSCSVMHEALHNHYTQKSLSLSLGGGGSGSAHPIPDSSPLLQFGGQVRQRYLYTDDACQTEAHLEIREDGTVGGAADQSPESLLQLKALKPGVIQILGVKTSRFLCQRPDGALYGSLHFDPEACSFRELLLEDGYNVYQSEAHGLPLHLPGCKSPHRDPAPRGPARFLPLPGLPPAPPEPPGILAPQPPDVGSSDPLSMVGSQGRSPSYAS

SEQ ID NO: 214 - protein, 473 aa, Artificial Sequence
  Fusion Protein
HGEGTFTSDLSKQLEEERVQEFIEWLKAGGPSSGAPPPSGGGGGGGSGGGGSGGGGSAESKYGPPCPPCPAPEFEGGPSVFLFPPKPKDTLMISRTPEVTCVVVDVSQEDPEVQFNWYVDGVEVHNAKTKPREEQFNSTYRVVSVLTVLHQDWLNGKEYKCKVSNKGLPSSIEKTISKAKGQPREPQVYTLPPSQEEMTKNQVSLTCLVKGFYPSDIAVEWESNGQPENNYKTTPPVLDSDGSFFLYSRLTVDKSRWQEGNVFSCSVMHEALHNHYTQKSLSLSLGGGGSGSAHPIPDSSPLLQFGGQVRQRYLYTDDACQTEAHLEIREDGTVGGAADQSPESLLQLKALKPGVIQILGVKTSRFLCQRPDGALYGSLHFDPEACSFRELLLEDGYNVYQSEAHGLPLHLPGCKSPHRDPAPRGPARFLPLPGLPPAPPEPPGILAPQPPDVGSSDPLSMVGSQGRSPSYAS

SEQ ID NO: 215 - protein, 831 aa, Artificial Sequence
  Fusion Protein
HGEGTFTSDLSKQLEEERVQLFIEWLKATGPSSGAPPPSGGGGGGGSGGGGSGGGGSADAHKSEVAHRFKDLGEENFKALVLIAFAQYLQQCPFEDHVKLVNEVTEFAKTCVADESAENCDKSLHTLFGDKLCTVATLRETYGEMADCCAKQEPERNECFLQHKDDNPNLPRLVRPEVDVMCTAFHDNEETFLKKYLYEIARRHPYFYAPELLFFAKRYKAAFTECCQAADKAACLLPKLDELRDEGKASSAKQRLKCASLQKFGERAFKAWAVARLSQRFPKAEFAEVSKLVTDLTKVHTECCHGDLLECADDRADLAKYICENQDSISSKLKECCEKPLLEKSHCIAEVENDEMPADLPSLAADFVESKDVCKNYAEAKDVFLGMFLYEYARRHPDYSVVLLLRLAKTYETTLEKCCAAADPHECYAKVFDEFKPLVEEPQNLIKQNCELFEQLGEYKFQNALLVRYTKKVPQVSTPTLVEVSRNLGKVGSKCCKHPEAKRMPCAEDYLSVVLNQLCVLHEKTPVSDRVTKCCTESLVNRRPCFSALEVDETYVPKEFNAETFTFHADICTLSEKERQIKKQTALVELVKHKPKATKEQLKAVMDDFAAFVEKCCKADDKETCFAEEGKKLVAASQAALGLGGGSGSAHPIPDSSPLLQFGGQVRQRYLYTDDACQTEAHLEIREDGTVGGAADQSPESLLQLKALKPGVIQILGVKTSRFLCQRPDGALYGSLHFDPEACSFRELLLEDGYNVYQSEAHGLPLHLPGCKSPHRDPAPRGPARFLPLPGLPPAPPEPPGILAPQPPDVGSSDPLSMVYPSQGRSPSYAS

SEQ ID NO: 216 - protein, 830 aa, Artificial Sequence
  Fusion Protein
GHGEGTFTSDKSKQLEEEAVRLFIEWLKAGGPKKIRYSGGGGGGGSGGGGSGGGGSADAHKSEVAHRFKDLGEENFKALVLIAFAQYLQQCPFEDHVKLVNEVTEFAKTCVADESAENCDKSLHTLFGDKLCTVATLRETYGEMADCCAKQEPERNECFLQHKDDNPNLPRLVRPEVDVMCTAFHDNEETFLKKYLYEIARRHPYFYAPELLFFAKRYKAAFTECCQAADKAACLLPKLDELRDEGKASSAKQRLKCASLQKFGERAFKAWAVARLSQRFPKAEFAEVSKLVTDLTKVHTECCHGDLLECADDRADLAKYICENQDSISSKLKECCEKPLLEKSHCIAEVENDEMPADLPSLAADFVESKDVCKNYAEAKDVFLGMFLYEYARRHPDYSVVLLLRLAKTYETTLEKCCAAADPHECYAKVFDEFKPLVEEPQNLIKQNCELFEQLGEYKFQNALLVRYTKKVPQVSTPTLVEVSRNLGKVGSKCCKHPEAKRMPCAEDYLSVVLNQLCVLHEKTPVSDRVTKCCTESLVNRRPCFSALEVDETYVPKEFNAETFTFHADICTLSEKERQIKKQTALVELVKHKPKATKEQLKAVMDDFAAFVEKCCKADDKETCFAEEGKKLVAASQAALGLGGGSGSAHPIPDSSPLLQFGGQVRQRYLYTDDACQTEAHLEIREDGTVGGAADQSPESLLQLKALKPGVIQILGVKTSRFLCQRPDGALYGSLHFDPEACSFRELLLEDGYNVYQSEAHGLPLHLPGCKSPHRDPAPRGPARFLPLPGLPPAPPEPPGILAPQPPDVGSSDPLSMVYPSQGRSPSYAS

SEQ ID NO: 217 - protein, 475 aa, Artificial Sequence
  Fusion Protein
YSEGTFTSDLSILCEKRAVHEFIEWLIAGGPSSGKPPPKPGCGSGGGGGSGGGGSGGGGGADKTHTCPPCPAPEAAGGPSVFLFPPKPKDTLMISRTPEVTCVVVDVSHEDPEVKFNWYVDGVEVHNAKTKPREEQYNSTYRVVSVLTVLHQDWLNGKEYKCKVSNKALPAPIEKTISKAKGQPREPQVYTLPPSRDELTKNQVSLTCLVKGFYPSDIAVEWESNGQPENNYKTTPPVLDSDGSFFLYSKLTVDKSRWQQGNVFSCSVMHEALHNHYTQKSLSLSPGGGGSGSAHPIPDSSPLLQFGGQVRQRYLYTDDACQTEAHLEIREDGTVGGAADQSPESLLQLKALKPGVIQILGVKTSRFLCQRPDGALYGSLHFDPEACSFRELLLEDGYNVYQSEAHGLPLHLPGCKSPHRDPAPRGPARFLPLPGLPPAPPEPPGILAPQPPDVGSSDPLSMVYPSQGRSPSYAS

SEQ ID NO: 218 - protein, 445 aa, Artificial Sequence
  Fusion Protein
GHGEGTFTSDKSKQLEEEAVRLFIEWLKAGGDKTHTCPPCPAPEAAGGPSVFLFPPKPKDTLMISRTPEVTCVVVDVSHEDPEVKFNWYVDGVEVHNAKTKPREEQYNSTYRVVSVLTVLHQDWLNGKEYKCKVSNKALPAPIEKTISKAKGQPREPQVYTLPPSRDELTKNQVSLTCLVKGFYPSDIAVEWESNGQPENNYKTTPPVLDSDGSFFLYSKLTVDKSRWQQGNVFSCSVMHEALHNHYTQKSLSLSPGGGGSGSAHPIPDSSPLLQFGGQVRQRYLYTDDACQTEAHLEIREDGTVGGAADQSPESLLQLKALKPGVIQILGVKTSRFLCQRPDGALYGSLHFDPEACSFRELLLEDGYNVYQSEAHGLPLHLPGCKSPHRDPAPRGPARFLPLPGLPPAPPEPPGILAPQPPDVGSSDPLSMVYPSQGRSPSYAS

SEQ ID NO: 219 - protein, 464 aa, Artificial Sequence
  Fusion Protein
GHGEGTFTSDKSKQLEEEAVRLFIEWLKAGGGGGGGGGSGGGGSGGGGSADKTHTCPPCPAPEAAGGPSVFLFPPKPKDTLMISRTPEVTCVVVDVSHEDPEVKFNWYVDGVEVHNAKTKPREEQYNSTYRVVSVLTVLHQDWLNGKEYKCKVSNKALPAPIEKTISKAKGQPREPQVYTLPPSRDELTKNQVSLTCLVKGFYPSDIAVEWESNGQPENNYKTTPPVLDSDGSFFLYSKLTVDKSRWQQGNVFSCSVMHEALHNHYTQKSLSLSPGGGGSGSAHPIPDSSPLLQFGGQVRQRYLYTDDACQTEAHLEIREDGTVGGAADQSPESLLQLKALKPGVIQILGVKTSRFLCQRPDGALYGSLHFDPEACSFRELLLEDGYNVYQSEAHGLPLHLPGCKSPHRDPAPRGPARFLPLPGLPPAPPEPPGILAPQPPDVGSSDPLSMVYPSQGRSPSYAS

SEQ ID NO: 220 - protein, 460 aa, Artificial Sequence
  Fusion Protein
GHGEGTFTSDKSKQLEEEAVRLFIEWLKAGGPAPAPAPAPAPAGGGDKTHTCPPCPAPEAAGGPSVFLFPPKPKDTLMISRTPEVTCVVVDVSHEDPEVKFNWYVDGVEVHNAKTKPREEQYNSTYRVVSVLTVLHQDWLNGKEYKCKVSNKALPAPIEKTISKAKGQPREPQVYTLPPSRDELTKNQVSLTCLVKGFYPSDIAVEWESNGQPENNYKTTPPVLDSDGSFFLYSKLTVDKSRWQQGNVFSCSVMHEALHNHYTQKSLSLSPGGGGSGSAHPIPDSSPLLQFGGQVRQRYLYTDDACQTEAHLEIREDGTVGGAADQSPESLLQLKALKPGVIQILGVKTSRFLCQRPDGALYGSLHFDPEACSFRELLLEDGYNVYQSEAHGLPLHLPGCKSPHRDPAPRGPARFLPLPGLPPAPPEPPGILAPQPPDVGSSDPLSMVYPSQGRSPSYAS

SEQ ID NO: 221 - protein, 466 aa, Artificial Sequence
  Fusion Protein
GHGEGTFTSDKSKQLEEEAVRLFIEWLKAGPAPAPAEAAAKEAAAKPAPAPADKTHTCPPCPAPEAAGGPSVFLFPPKPKDTLMISRTPEVTCVVVDVSHEDPEVKFNWYVDGVEVHNAKTKPREEQYNSTYRVVSVLTVLHQDWLNGKEYKCKVSNKALPAPIEKTISKAKGQPREPQVYTLPPSRDELTKNQVSLTCLVKGFYPSDIAVEWESNGQPENNYKTTPPVLDSDGSFFLYSKLTVDKSRWQQGNVFSCSVMHEALHNHYTQKSLSLSPGGGGSGSAHPIPDSSPLLQFGGQVRQRYLYTDDACQTEAHLEIREDGTVGGAADQSPESLLQLKALKPGVIQILGVKTSRFLCQRPDGALYGSLHFDPEACSFRELLLEDGYNVYQSEAHGLPLHLPGCKSPHRDPAPRGPARFLPLPGLPPAPPEPPGILAPQPPDVGSSDPLSMVYPSQGRSPSYAS

SEQ ID NO: 222 - protein, 464 aa, Artificial Sequence
  Fusion Protein
GHGEGTFTSDKSKQLEEEAVRLFIEWLKAGGAEAAAKEAAAKEAAAKGGGDKTHTCPPCPAPEAAGGPSVFLFPPKPKDTLMISRTPEVTCVVVDVSHEDPEVKFNWYVDGVEVHNAKTKPREEQYNSTYRVVSVLTVLHQDWLNGKEYKCKVSNKALPAPIEKTISKAKGQPREPQVYTLPPSRDELTKNQVSLTCLVKGFYPSDIAVEWESNGQPENNYKTTPPVLDSDGSFFLYSKLTVDKSRWQQGNVFSCSVMHEALHNHYTQKSLSLSPGGGGSGSAHPIPDSSPLLQFGGQVRQRYLYTDDACQTEAHLEIREDGTVGGAADQSPESLLQLKALKPGVIQILGVKTSRFLCQRPDGALYGSLHFDPEACSFRELLLEDGYNVYQSEAHGLPLHLPGCKSPHRDPAPRGPARFLPLPGLPPAPPEPPGILAPQPPDVGSSDPLSMVYPSQGRSPSYAS

SEQ ID NO: 223 - protein, 489 aa, Artificial Sequence
  Fusion Protein
GHGEGTFTSDKSKQLEEEAVRLFIEWLKAGGAEAAAKEAAAKEAAAKEAAKALEAEAAKEAAKEAAKEAAKAGGGDKTHTCPPCPAPEAAGGPSVFLFPPKPKDTLMISRTPEVTCVVVDVSHEDPEVKFNWYVDGVEVHNAKTKPREEQYNSTYRVVSVLTVLHQDWLNGKEYKCKVSNKALPAPIEKTISKAKGQPREPQVYTLPPSRDELTKNQVSLTCLVKGFYPSDIAVEWESNGQPENNYKTTPPVLDSDGSFFLYSKLTVDKSRWQQGNVFSCSVMHEALHNHYTQKSLSLSPGGGGSGSAHPIPDSSPLLQFGGQVRQRYLYTDDACQTEAHLEIREDGTVGGAADQSPESLLQLKALKPGVIQILGVKTSRFLCQRPDGALYGSLHFDPEACSFRELLLEDGYNVYQSEAHGLPLHLPGCKSPHRDPAPRGPARFLPLPGLPPAPPEPPGILAPQPPDVGSSDPLSMVYPSQGRSPSYAS

SEQ ID NO: 224 - protein, 452 aa, Artificial Sequence
  Fusion Protein
GHGEGTFTSDKSKQLEEEAVRLFIEWLKAGGPKKIRYSDKTHTCPPCPAPEAAGGPSVFLFPPKPKDTLMISRTPEVTCVVVDVSHEDPEVKFNWYVDGVEVHNAKTKPREEQYNSTYRVVSVLTVLHQDWLNGKEYKCKVSNKALPAPIEKTISKAKGQPREPQVYTLPPSRDELTKNQVSLTCLVKGFYPSDIAVEWESNGQPENNYKTTPPVLDSDGSFFLYSKLTVDKSRWQQGNVFSCSVMHEALHNHYTQKSLSLSPGGGGSGSAHPIPDSSPLLQFGGQVRQRYLYTDDACQTEAHLEIREDGTVGGAADQSPESLLQLKALKPGVIQILGVKTSRFLCQRPDGALYGSLHFDPEACSFRELLLEDGYNVYQSEAHGLPLHLPGCKSPHRDPAPRGPARFLPLPGLPPAPPEPPGILAPQPPDVGSSDPLSMVYPSQGRSPSYAS

SEQ ID NO: 225 - protein, 467 aa, Artificial Sequence
  Fusion Protein
GHGEGTFTSDKSKQLEEEAVRLFIEWLKAGGPKKIRYSPAPAPAPAPAPAGGGDKTHTCPPCPAPEAAGGPSVFLFPPKPKDTLMISRTPEVTCVVVDVSHEDPEVKFNWYVDGVEVHNAKTKPREEQYNSTYRVVSVLTVLHQDWLNGKEYKCKVSNKALPAPIEKTISKAKGQPREPQVYTLPPSRDELTKNQVSLTCLVKGFYPSDIAVEWESNGQPENNYKTTPPVLDSDGSFFLYSKLTVDKSRWQQGNVFSCSVMHEALHNHYTQKSLSLSPGGGGSGSAHPIPDSSPLLQFGGQVRQRYLYTDDACQTEAHLEIREDGTVGGAADQSPESLLQLKALKPGVIQILGVKTSRFLCQRPDGALYGSLHFDPEACSFRELLLEDGYNVYQSEAHGLPLHLPGCKSPHRDPAPRGPARFLPLPGLPPAPPEPPGILAPQPPDVGSSDPLSMVYPSQGRSPSYAS

SEQ ID NO: 226 - protein, 474 aa, Artificial Sequence
  Fusion Protein
GHGEGTFTSDKSKQLEEEAVRLFIEWLKAGGPKKIRYSPAPAPAEAAAKEAAAKPAPAPADKTHTCPPCPAPEAAGGPSVFLFPPKPKDTLMISRTPEVTCVVVDVSHEDPEVKFNWYVDGVEVHNAKTKPREEQYNSTYRVVSVLTVLHQDWLNGKEYKCKVSNKALPAPIEKTISKAKGQPREPQVYTLPPSRDELTKNQVSLTCLVKGFYPSDIAVEWESNGQPENNYKTTPPVLDSDGSFFLYSKLTVDKSRWQQGNVFSCSVMHEALHNHYTQKSLSLSPGGGGSGSAHPIPDSSPLLQFGGQVRQRYLYTDDACQTEAHLEIREDGTVGGAADQSPESLLQLKALKPGVIQILGVKTSRFLCQRPDGALYGSLHFDPEACSFRELLLEDGYNVYQSEAHGLPLHLPGCKSPHRDPAPRGPARFLPLPGLPPAPPEPPGILAPQPPDVGSSDPLSMVYPSQGRSPSYAS

SEQ ID NO: 227 - protein, 471 aa, Artificial Sequence
  Fusion Protein
GHGEGTFTSDKSKQLEEEAVRLFIEWLKAGGPKKIRYSAEAAAKEAAAKEAAAKGGGDKTHTCPPCPAPEAAGGPSVFLFPPKPKDTLMISRTPEVTCVVVDVSHEDPEVKFNWYVDGVEVHNAKTKPREEQYNSTYRVVSVLTVLHQDWLNGKEYKCKVSNKALPAPIEKTISKAKGQPREPQVYTLPPSRDELTKNQVSLTCLVKGFYPSDIAVEWESNGQPENNYKTTPPVLDSDGSFFLYSKLTVDKSRWQQGNVFSCSVMHEALHNHYTQKSLSLSPGGGGSGSAHPIPDSSPLLQFGGQVRQRYLYTDDACQTEAHLEIREDGTVGGAADQSPESLLQLKALKPGVIQILGVKTSRFLCQRPDGALYGSLHFDPEACSFRELLLEDGYNVYQSEAHGLPLHLPGCKSPHRDPAPRGPARFLPLPGLPPAPPEPPGILAPQPPDVGSSDPLSMVYPSQGRSPSYAS

SEQ ID NO: 228 - protein, 496 aa, Artificial Sequence
  Fusion Protein
GHGEGTFTSDKSKQLEEEAVRLFIEWLKAGGPKKIRYSAEAAAKEAAAKEAAAKEAAKALEAEAAKEAAKEAAKEAAKAGGGDKTHTCPPCPAPEAAGGPSVFLFPPKPKDTLMISRTPEVTCVVVDVSHEDPEVKFNWYVDGVEVHNAKTKPREEQYNSTYRVVSVLTVLHQDWLNGKEYKCKVSNKALPAPIEKTISKAKGQPREPQVYTLPPSRDELTKNQVSLTCLVKGFYPSDIAVEWESNGQPENNYKTTPPVLDSDGSFFLYSKLTVDKSRWQQGNVFSCSVMHEALHNHYTQKSLSLSPGGGGSGSAHPIPDSSPLLQFGGQVRQRYLYTDDACQTEAHLEIREDGTVGGAADQSPESLLQLKALKPGVIQILGVKTSRFLCQRPDGALYGSLHFDPEACSFRELLLEDGYNVYQSEAHGLPLHLPGCKSPHRDPAPRGPARFLPLPGLPPAPPEPPGILAPQPPDVGSSDPLSMVYPSQGRSPSYAS

SEQ ID NO: 229 - protein, 472 aa, Artificial Sequence
  Fusion Protein
HGEGTFTSDKSKQLEKRLVRLFYEWLIAGGHSSGKPPPKGGGGGGGSGGGGSGGGGSADKTHTCPPCPAPEAAGGPSVFLFPPKPKDTLMISRTPEVTCVVVDVSHEDPEVKFNWYVDGVEVHNAKTKPREEQYNSTYRVVSVLTVLHQDWLNGKEYKCKVSNKALPAPIEKTISKAKGQPREPQVYTLPPSRDELTKNQVSLTCLVKGFYPSDIAVEWESNGQPENNYKTTPPVLDSDGSFFLYSKLTVDKSRWQQGNVFSCSVMHEALHNHYTQKSLSLSPGGGGSGSAHPIPDSSPLLQFGGQVRQRYLYTDDACQTEAHLEIREDGTVGGAADQSPESLLQLKALKPGVIQILGVKTSRFLCQRPDGALYGSLHFDPEACSFRELLLEDGYNVYQSEAHGLPLHLPGCKSPHRDPAPRGPARFLPLPGLPPAPPEPPGILAPQPPDVGSSDPLSMVYPSQGRSPSYAS

SEQ ID NO: 230 - protein, 460 aa, Artificial Sequence
  Fusion Protein
HGEGTFTSDLSKQMEEEAVRLFIEWLKNGGPSSGAPPPSGGGGSGGGGSGGGGSDKTHTCPPCPAPEAAGGPSVFLFPPKPKDTLMISRTPEVTCVVVDVSHEDPEVKFNWYVDGVEVHNAKTKPREEQYNSTYRVVSVLTVLHQDWLNGKEYKCKVSNKALPAPIEKTISKAKGQPREPQVYTLPPSREEMTKNQVSLTCLVKGFYPSDIAVEWESNGQPENNYKTTPPVLDSDGSFFLYSKLTVDKSRWQQGNVFSCSVMHEALHNHYTQKSLSLSPGKGSDSSPLLQFGGQVRQRYLYTDDACQTEAHLEIREDGTVGGAADQSPESLLQLKALKPGVIQILGVKTSRFLCQRPDGTLYGSLHFDPEACSFRELLLEDGYNVYQSEAHGLPLHLPCNRSPHRDPASRGPARFLPLPGLPPALPEPPGILAPQPPDVGSSDPLAMVGGSQARSPSYAS

SEQ ID NO: 231 - protein, 7 aa, Artificial Sequence
  Linker
GGGSGSA

SEQ ID NO: 232 - protein, 19 aa, Artificial Sequence
  Linker
GGGGGGGSGGGGSGGGGSA

SEQ ID NO: 233 - protein, 11 aa, Artificial Sequence
  Linker
GGGSGGSGGSA

SEQ ID NO: 234 - protein, 15 aa, Artificial Sequence
  Linker
GGGSGGGGSGGGGSA

SEQ ID NO: 235 - protein, 15 aa, Artificial Sequence
  Linker
GGGGSGGGGSGGGGS

SEQ ID NO: 236 - protein, 15 aa, Artificial Sequence
  Linker
PAPAPAPAPAPAGGG

SEQ ID NO: 237 - protein, 19 aa, Artificial Sequence
  Linker
AEAAAKEAAAKEAAAKGGG

SEQ ID NO: 238 - protein, 19 aa, Artificial Sequence
  Linker
GGKKGKKGKKGGSGKKGSA

SEQ ID NO: 239 - protein, 21 aa, Artificial Sequence
  Linker
GGKKKKGGKKKKGGKKKKGSA

SEQ ID NO: 240 - protein, 22 aa, Artificial Sequence
  Linker
PAPAPAEAAAKEAAAKPAPAPA

SEQ ID NO: 241 - protein, 24 aa, Artificial Sequence
  Linker
GGKKKKKGGKKKKKGGKKKKKGSA

SEQ ID NO: 242 - protein, 44 aa, Artificial Sequence
  Linker
AEAAAKEAAAKEAAAKEAAKALEAEAAKEAAKEAAKEAAKAGGG

SEQ ID NO: 243 - protein, 4 aa, Artificial Sequence
  Linker
PAPA

SEQ ID NO: 244 - protein, 6 aa, Artificial Sequence
  Linker
PAPAPA

SEQ ID NO: 245 - protein, 9 aa, Artificial Sequence
  Linker
PAPAPAGGG

SEQ ID NO: 246 - protein, 21 aa, Artificial Sequence
  Signal Sequence
MYRMQLLSCIALLSLALVTNS

SEQ ID NO: 247 - protein, 28 aa, Artificial Sequence
  His-Tag
DIQTGGSHAHGHGHAHGHGGSGENLYFQ

SEQ ID NO: 248 - protein, 20 aa, Artificial Sequence
  His-Tag
MGHHHHHHHHGGGENLYFQG

SEQ ID NO: 249 - protein, 108 aa, Artificial Sequence
  His-Tag
MGHHHHHHGSLQDSEVNQEAKPEVKPEVKPETHINLKVSDGSSEIFFKIKKTTPLRRLMEAFAKRQGKEMDSLRFLYDGIRIQADQAPEDLDMEDNDIIEAHREQIGG

SEQ ID NO: 250 - protein, 209 aa, Homo sapiens [sequence omitted]

SEQ ID NO: 251 - protein, 181 aa, Homo sapiens
HPIPDSSPLLQFGGQVRQRYLYTDDAQQTEAHLEIREDGTVGGAADQSPESLLQLKALKPGVIQILGVKTSRFLCQRPDGALYGSLHFDPEACSFRELLLEDGYNVYQSEAHGLPLHLPGNKSPHRDPAPRGPARFLPLPGLPPAPPEPPGILAPQPPDVGSSDPLSMVGPSQGRSPSYAS

SEQ ID NO: 252 - protein, 182 aa, Artificial Sequence
  G-FGF21
GHPIPDSSPLLQFGGQVRQRYLYTDDAQQTEAHLEIREDGTVGGAADQSPESLLQLKALKPGVIQILGVKTSRFLCQRPDGALYGSLHFDPEACSFRELLLEDGYNVYQSEAHGLPLHLPGNKSPHRDPAPRGPARFLPLPGLPPAPPEPPGILAPQPPDVGSSDPLSMVGPSQGRSPSYAS

SEQ ID NO: 253 - protein, 180 aa, Artificial Sequence
  FGF21 Variant
HPIPDSSPLLQFGGQVRQRYLYTDDACQTEAHLEIREDGTVGGAADQSPESLLQLKALKPGVIQILGVKTSRFLCQRPDGALYGSLHFDPEACSFRELLLEDGYNVYQSEAHGLPLHLPGCKSPHRDPAPRGPARFLPLPGLPPAPPEPPGILAPQPPDVGSSDPLSMVGSQGRSPSYAS

SEQ ID NO: 254 - protein, 181 aa, Artificial Sequence
  FGF21 Variant
HPIPDSSPLLQFGGQVRQRYLYTDDACQTEAHLEIREDGTVGGAADQSPESLLQLKALKPGVIQILGVKTSRFLCQRPDGALYGSLHFDPEACSFRELLLEDGYNVYQSEAHGLPLHLPGCKSPHRDPAPRGPARFLPLPGLPPAPPEPPGILAPQPPDVGSSDPLSMVYPSQGRSPSYAS

SEQ ID NO: 255 - protein, 180 aa, Artificial Sequence
  FGF21 Variant
HPIPDSSPLLQFGGQVRQRYLYTDDACQTEAHLEIREDGTVGGAADQSPESLLQLKALKPGVIQILGVKTSRFLCQRPDGALYGSLHFDPEACSFRELLLEDGYNVYQSEAHGLPLHLCGNKSPHRDPAPRGPARFLPLPGLPPAPPEPPGILAPQPPDVGSSDPLSMVGSQGRSPSYAS

SEQ ID NO: 256 - protein, 181 aa, Artificial Sequence
  FGF21 Variant
HPIPDSSPLLQFGGQVRQRYLYTDDACQTEAHLEIREDGTVGGAADQSPESLLQLKALKPGVIQILGVKTSRFLCQRPDGALYGSLHFDPEACSFRELLLEDGYNVYQSEAHGLPLHLCGNKSPHRDPAPRGPARFLPLPGLPPAPPEPPGILAPQPPDVGSSDPLSMVYPSQGRSPSYAS

SEQ ID NO: 257 - protein, 225 aa, Artificial Sequence
  IgG1Fc-LALA
DKTHTCPPCPAPEAAGGPSVFLFPPKPKDTLMISRTPEVTCVVVDVSHEDPEVKFNWYVDGVEVHNAKTKPREEQYNSTYRVVSVLTVLHQDWLNGKEYKCKVSNKALPAPIEKTISKAKGQPREPQVYTLPPSRDELTKNQVSLTCLVKGFYPSDIAVEWESNGQPENNYKTTPPVLDSDGSFFLYSKLTVDKSRWQQGNVFSCSVMHEALHNHYTQKSLSLSP

SEQ ID NO: 258 - protein, 228 aa, Artificial Sequence
  IgG4Fc
ESKYGPPCPPCPAPEFEGGPSVFLFPPKPKDTLMISRTPEVTCVVVDVSQEDPEVQFNWYVDGVEVHNAKTKPREEQFNSTYRVVSVLTVLHQDWLNGKEYKCKVSNKGLPSSIEKTISKAKGQPREPQVYTLPPSQEEMTKNQVSLTCLVKGFYPSDIAVEWESNGQPENNYKTTPPVLDSDGSFFLYSRLTVDKSRWQEGNVFSCSVMHEALHNHYTQKSLSLSLG

SEQ ID NO: 259 - protein, 226 aa, Artificial Sequence
  IgG1NNAS
DKTHTCPPCPAPELLGGPSVFLFPPKPKDTLMISRTPEVTCVVVDVSHEDPEVKFNWYVDGVEVHNAKTKPREEQYNNASRVVSVLTVLHQDWLNGKEYKCKVSNKALPAPIEKTISKAKGQPREPQVYTLPPSRDELTKNQVSLTCLVKGFYPSDIAVEWESNGQPENNYKTTPPVLDSDGSFFLYSKLTVDKSRWQQGNVFSCSVMHEALHNHYTQKSLSLSPG

SEQ ID NO: 260 - protein, 30 aa, Homo sapiens
HAEGTFTSDVSSYLEGQAAKEFIAWLVKGR

SEQ ID NO: 261 - protein, 39 aa, Artificial Sequence
  GLP Peptide
HGEGTFTSDLSKQLEEERVQLFIEWLKATGPSSGAPPPS

SEQ ID NO: 262 - protein, 38 aa, Artificial Sequence
  GLP Peptide
GHGEGTFTSDKSKQLEEEAVRLFIEWLKAGGPKKIRYS

SEQ ID NO: 263 - protein, 44 aa, Artificial Sequence
  GLP Peptide
HGEGTFTSDLSIQLDEEAVRLFIEWLLATGPVSGAPPSKKKKKK

SEQ ID NO: 264 - protein, 39 aa, Artificial Sequence
  GLP Peptide
HGEGTFTSDLSKQLEEEAVRLFIEWLKAGGPSSGAPPPS

SEQ ID NO: 265 - protein, 39 aa, Artificial Sequence
  GLP Peptide
HGEGTFTSDLSKQLEEEAVRLFIEWLKATGPSSGAPPPS

SEQ ID NO: 266 - protein, 39 aa, Artificial Sequence
  GLP Peptide
HGEGTFTSDLSKQLEEEAVQLFIEWLKATGPSSGAPPPS

SEQ ID NO: 267 - protein, 39 aa, Artificial Sequence
  GLP Peptide
HGEGTFTSDLSKQLEEEAVQEFIEWLKAGGPSSGAPPPS

SEQ ID NO: 268 - protein, 39 aa, Artificial Sequence
  GLP Peptide
HGEGTFTSDLSKQLEEERVQEFIEWLKAGGPSSGAPPPS

SEQ ID NO: 269 - protein, 39 aa, Artificial Sequence
  GLP Peptide
HGEGTFTSDLSIQLEEEAVRLFIEWLLATGPVSGAPPPS

SEQ ID NO: 270 - protein, 39 aa, Artificial Sequence
  GLP Peptide
HGEGTFTSDLSIQLEEEAVRLFIEWLLATGPESGAPPPS

SEQ ID NO: 271 - protein, 39 aa, Artificial Sequence
  GLP Peptide
HGEGTFTSDLSIQLEEERVQEFIEWLLAGGPSSGAPPPS

SEQ ID NO: 272 - protein, 39 aa, Artificial Sequence
  GLP Peptide
HGEGTFTSDLSIQLEEEAVQEFIEWLLATGPSSGAPPPS

SEQ ID NO: 273 - protein, 39 aa, Artificial Sequence
  GLP Peptide
HGEGTFTSDLSILLDEEAVREFIEWLLATGPVSGAPPPS

SEQ ID NO: 274 - protein, 39 aa, Artificial Sequence
  GLP Peptide
YGEGTFTSDKSKQLEKRLAHLFIEWLIAGGHSSGKPPPK

SEQ ID NO: 275 - protein, 39 aa, Artificial Sequence
  GLP Peptide
YGEGTFTSDKSKQLEKRLAHLFIEWLIKGGHSSGKPPPK

SEQ ID NO: 276 - protein, 39 aa, Artificial Sequence
  GLP Peptide
HTEGTFTSDKSKQLEKRLVRLFIEWLIKGGHSSGKPPPK

SEQ ID NO: 277 - protein, 39 aa, Artificial Sequence
  GLP Peptide
HGEGTFTSDKSKQLAKRLVRLFIEWLIKGGHSSGKPPPK

SEQ ID NO: 278 - protein, 38 aa, Artificial Sequence; identical to SEQ ID NO: 262
  GLP Peptide

SEQ ID NO: 279 - protein, 38 aa, Artificial Sequence
  GLP Peptide
GHGEGTFTSDKSKQLEEERVQLFIEWLKAGGPKKIRYS

SEQ ID NO: 280 - protein, 37 aa, Artificial Sequence
  GLP Peptide
HGEGTFTSDKSKQLEEERVQLFIEWLKAGGPKKIRYS

SEQ ID NO: 281 - protein, 38 aa, Artificial Sequence
  GLP Peptide
GHGEGTFTSDLSKQLEEEAVRLFIEWLKAGGPKKIRYS

SEQ ID NO: 282 - protein, 38 aa, Artificial Sequence
  GLP Peptide
GHGEGTFTSDLSKQLEEERVRLFIEWLKAGGPKKIRYS

SEQ ID NO: 283 - protein, 37 aa, Artificial Sequence
  GLP Peptide
HGEGTFTSDLSKQLEEERVRLFIEWLKAGGPKKIRYS

SEQ ID NO: 284 - protein, 38 aa, Artificial Sequence
  GLP Peptide
GHGEGTFTSDLSKQLEEERVQLFIEWLKAGGPKKIRYS

SEQ ID NO: 285 - protein, 37 aa, Artificial Sequence
  GLP Peptide
HGEGTFTSDLSKQLEEEAVRLFIEWLKAGGPKKIRYS

SEQ ID NO: 286 - protein, 38 aa, Artificial Sequence
  GLP Peptide
GHGEGTFTSDLSKQLEEEAVQLFIEWLKAGGPKKIRYS

SEQ ID NO: 287 - protein, 37 aa, Artificial Sequence
  GLP Peptide
HGEGTFTSDLSKQLEEEAVQLFIEWLKAGGPKKIRYS

SEQ ID NO: 288 - protein, 37 aa, Artificial Sequence
  GLP Peptide
HGEGTFTSDKSKQLEEEAVRLFIEWLKAGGPKKIRYS

SEQ ID NO: 289 - protein, 37 aa, Artificial Sequence
  GLP Peptide
HGEGTFTSDKSKQLEEEAVQLFIEWLKAGGPKKIRYS

SEQ ID NO: 290 - protein, 38 aa, Artificial Sequence
  GLP Peptide
GHGEGTFTSDKSKQLEEEAVRLFIEWLKAGGPKKQRLS

SEQ ID NO: 291 - protein, 40 aa, Artificial Sequence
  GLP Peptide
GHGEGTFTSDLSKQLEEEAVQLFIEWLKAGGPSSGAPPPS

SEQ ID NO: 292 - protein, 40 aa, Artificial Sequence
  GLP Peptide
GHGEGTFTSDLSKQLEEEAVRLFIEWLKAGGPSSGAPPPS

SEQ ID NO: 293 - protein, 40 aa, Artificial Sequence
  GLP Peptide
GHGEGTFTSDKSKQLEEEAVRLFIEWLKAGGPSSGAPPPS

SEQ ID NO: 294 - protein, 40 aa, Artificial Sequence
  GLP Peptide
GHGEGTFTSDLSKQLEEERVQLFIEWLKAGGPSSGAPPPS

SEQ ID NO: 295 - protein, 39 aa, Artificial Sequence
  GLP Peptide
YGEGTFTSDKSQLLEKRLAHLFIEWLIAGGHSSGKPPPK

SEQ ID NO: 296 - protein, 39 aa, Artificial Sequence
  GLP Peptide
HGEGTFTSDKSKQLEKRLVFLFIEWLIAGGHSSGKPPPK

SEQ ID NO: 297 - protein, 38 aa, Artificial Sequence
  GLP Peptide
GHGEGTFTSDKSKQLEEEAVQLFIEWLKAGGPKKIRYS

SEQ ID NO: 298 - protein, 38 aa, Artificial Sequence
  GLP Peptide
GHGEGTFTSDKSKQLEEERVRLFIEWLKAGGPKKIRYS

SEQ ID NO: 299 - protein, 37 aa, Artificial Sequence
  GLP Peptide
HGEGTFTSDKSKQLEEERVRLFIEWLKAGGPKKIRYS

SEQ ID NO: 300 - protein, 39 aa, Artificial Sequence
  GLP Peptide
HGEGTFTSDKSKQLEEEAVRLFIEWLKAGGPSSGAPPPS

SEQ ID NO: 301 - protein, 32 aa, Artificial Sequence
  GLP Peptide
GHGEGTFTSDKSKQLEEEAVRLFIEWLKAGGP

SEQ ID NO: 302 - protein, 40 aa, Artificial Sequence
  GLP Peptide
AHGEGTFTSDKSIQLEKEAVRLFIEWLLAGGHPSGKPPPK

SEQ ID NO: 303 - protein, 40 aa, Artificial Sequence
  GLP Peptide
AHGEGTFTSDLSILLDEEAVQEFIEWLLATGPSSGAPPPS

SEQ ID NO: 304 - protein, 40 aa, Artificial Sequence
  GLP Peptide
AHGEGTFTSDLSILLDEEAVQEFIEWLLATGPVSGAPPPS

SEQ ID NO: 305 - protein, 40 aa, Artificial Sequence
  GLP Peptide
AHGEGTFTSDLSILLDEEAVQLFIEWLLATGPSSGAPPPS

SEQ ID NO: 306 - protein, 40 aa, Artificial Sequence
  GLP Peptide
AHGEGTFTSDLSILLDEEAVQLFIEWLLATGPVSGAPPPS

SEQ ID NO: 307 - protein, 40 aa, Artificial Sequence
  GLP Peptide
AHGEGTFTSDLSILLDEEAVREFIEWLLATGPSSGAPPPS

SEQ ID NO: 308 - protein, 40 aa, Artificial Sequence
  GLP Peptide
AHGEGTFTSDLSILLDEEAVREFIEWLLATGPVSGAPPPS

SEQ ID NO: 309 - protein, 40 aa, Artificial Sequence
  GLP Peptide
AHGEGTFTSDLSILLEEEAVQLFIEWLLATGPVSGAPPPS

SEQ ID NO: 310 - protein, 40 aa, Artificial Sequence
  GLP Peptide
AHGEGTFTSDLSILLEEEAVREFIEWLLATGPSSGAPPPS

SEQ ID NO: 311 - protein, 40 aa, Artificial Sequence
  GLP Peptide
AHGEGTFTSDLSILLEEEAVREFIEWLLATGPVSGAPPPS

SEQ ID NO: 312 - protein, 40 aa, Artificial Sequence
  GLP Peptide
AHGEGTFTSDLSILLEEEAVRLFIEWLLATGPVSGAPPPS

SEQ ID NO: 313 - protein, 40 aa, Artificial Sequence
  GLP Peptide
AHGEGTFTSDLSIQLDEEAVQEFIEWLLATGPSSGAPPPS

SEQ ID NO: 314 - protein, 40 aa, Artificial Sequence
  GLP Peptide
AHGEGTFTSDLSIQLDEEAVQEFIEWLLATGPVSGAPPPS

SEQ ID NO: 315 - protein, 40 aa, Artificial Sequence
  GLP Peptide
AHGEGTFTSDLSIQLDEEAVQLFIEWLLATGPSSGAPPPS

SEQ ID NO: 316 - protein, 40 aa, Artificial Sequence
  GLP Peptide
AHGEGTFTSDLSIQLDEEAVQLFIEWLLATGPVSGAPPPS

SEQ ID NO: 317 - protein, 40 aa, Artificial Sequence
  GLP Peptide
AHGEGTFTSDLSIQLEEEAVQEFIEWLLATGPVSGAPPPS

SEQ ID NO: 318 - protein, 40 aa, Artificial Sequence
  GLP Peptide
AHGEGTFTSDLSIQLEEEAVQLFIEWLLATGPSSGAPPPS

SEQ ID NO: 319 - protein, 40 aa, Artificial Sequence
  GLP Peptide
AHGEGTFTSDLSIQLEEEAVQLFIEWLLATGPVSGAPPPS

SEQ ID NO: 320 - protein, 40 aa, Artificial Sequence
  GLP Peptide
AHGEGTFTSDLSIQLEEEAVREFIEWLLATGPVSGAPPPS

SEQ ID NO: 321 - protein, 40 aa, Artificial Sequence
  GLP Peptide
AHGEGTFTSDLSIQLEEEAVRLFIEWLLATGPSSGAPPPS

SEQ ID NO: 322 - protein, 39 aa, Artificial Sequence
  GLP Peptide
FGEGTFTSDKSKQLEKRLVRLFIEWLIAGGHSSGKPPPK

SEQ ID NO: 323 - protein, 40 aa, Artificial Sequence
  GLP Peptide
GHGEGTFTSDKSIQLEEEAVRLFIEWLLAGGHPSGKPPPK

SEQ ID NO: 324 - protein, 38 aa, Artificial Sequence
  GLP Peptide
GHGEGTFTSDKSKQLEEEAERLFIEWLKAGGPKKIRYS

SEQ ID NO: 325 - protein, 38 aa, Artificial Sequence
  GLP Peptide
GHGEGTFTSDKSKQLEEEAGRLFIEWLKAGGPKKIRYS

SEQ ID NO: 326 - protein, 38 aa, Artificial Sequence
  GLP Peptide
GHGEGTFTSDKSKQLEEEAHRLFIEWLKAGGPKKIRYS

SEQ ID NO: 327 - protein, 38 aa, Artificial Sequence
  GLP Peptide
GHGEGTFTSDKSKQLEEEAKRLFIEWLKAGGPKKIRYS

SEQ ID NO: 328 - protein, 38 aa, Artificial Sequence
  GLP Peptide
GHGEGTFTSDKSKQLEEEAQRLFIEWLKAGGPKKIRYS

SEQ ID NO: 329 - protein, 38 aa, Artificial Sequence
  GLP Peptide
GHGEGTFTSDKSKQLEEEASRLFIEWLKAGGPKKIRYS

SEQ ID NO: 330 - protein, 38 aa, Artificial Sequence
  GLP Peptide
GHGEGTFTSDKSKQLEEEATRLFIEWLKAGGPKKIRYS

SEQ ID NO: 331 - protein, 30 aa, Artificial Sequence
  GLP Peptide
GHGEGTFTSDKSKQLEEEAVRLFIEWLKAG

SEQ ID NO: 332 - protein, 31 aa, Artificial Sequence
  GLP Peptide
GHGEGTFTSDKSKQLEEEAVRLFIEWLKAGG

SEQ ID NO: 333 - protein, 40 aa, Artificial Sequence
  GLP Peptide
GHGEGTFTSDKSKQLEEEAVRLFIEWLKAGGHPSGKPPPK

SEQ ID NO: 334 - protein, 40 aa, Artificial Sequence
  GLP Peptide
GHGEGTFTSDKSQLLEKRLVHLFIEWLIAGGHSSGKLPPK

SEQ ID NO: 335 - protein, 40 aa, Artificial Sequence
  GLP Peptide
GHGEGTFTSDLSIQLDEEAVQEFIEWLLATGPVSGAPPPS

SEQ ID NO: 336 - protein, 40 aa, Artificial Sequence
  GLP Peptide
GHGEGTFTSDLSIQLDEEAVQLFIEWLLATGPVSGAPPPS

SEQ ID NO: 337 - protein, 40 aa, Artificial Sequence
  GLP Peptide
GHGEGTFTSDLSIQLDEEAVREFIEWLLATGPSSGAPPPS

SEQ ID NO: 338 - protein, 40 aa, Artificial Sequence
  GLP Peptide
GHGEGTFTSDLSIQLEEEAVQLFIEWLLATGPSSGAPPPS

SEQ ID NO: 339 - protein, 40 aa, Artificial Sequence
  GLP Peptide
GHGEGTFTSDLSIQLEEEAVRLFIEWLLAGGPSKGKPPPK

SEQ ID NO: 340 - protein, 40 aa, Artificial Sequence
  GLP Peptide
GHGEGTFTSDLSIQLEEEAVRLFIEWLLAGGPSSGAPPPS

SEQ ID NO: 341 - protein, 40 aa, Artificial Sequence
  GLP Peptide
GHGEGTFTSDLSIQLEEEAVRLFIEWLLAGGPSSGKPKPK

SEQ ID NO: 342 - protein, 40 aa, Artificial Sequence
  GLP Peptide
GHGEGTFTSDLSIQLEEEAVRLFIEWLLAGGPSSGKPPPK

SEQ ID NO: 343 - protein, 40 aa, Artificial Sequence
  GLP Peptide
GHGEGTFTSDLSIQLEEEAVRLFIEWLLAKGKSKGKPKPK

SEQ ID NO: 344 - protein, 40 aa, Artificial Sequence
  GLP Peptide
GHGEGTFTSDLSIQLEEEAVRLFIEWLLATGPSSGAPPPS

SEQ ID NO: 345 - protein, 40 aa, Artificial Sequence
  GLP Peptide
GHGEGTFTSDLSKQMEEEAVRLFIEWLKNGGPSSGAPPPS

SEQ ID NO: 346 - protein, 40 aa, Artificial Sequence
  GLP Peptide
GYGEGTFTSDKSQLLEERLVHLFIEWLIAGGHSSIKPPPK

SEQ ID NO: 347 - protein, 39 aa, Artificial Sequence
  GLP Peptide
HAQGTFTSDLSKQLESRRAQEFIEWLLATGPESGAPPPS

SEQ ID NO: 348 - protein, 39 aa, Artificial Sequence
  GLP Peptide
HGEGTFTSDKSILLAKRLVRLFIEWLIAGGHSSGKPPPK

SEQ ID NO: 349 - protein, 39 aa, Artificial Sequence
  GLP Peptide
HGEGTFTSDKSKLLEKRAAHLFIEWLIAGGHSKGKPPPK

SEQ ID NO: 350 - protein, 39 aa, Artificial Sequence
  GLP Peptide
HGEGTFTSDKSKLLEKRAAHLFIEWLIAGGHSSIKPPPK

SEQ ID NO: 351 - protein, 39 aa, Artificial Sequence
  GLP Peptide
HGEGTFTSDKSKLLEKRLAHLFIEWLIAGGHSKGKPPPK

SEQ ID NO: 352 - protein, 39 aa, Artificial Sequence
  GLP Peptide
HGEGTFTSDKSKLLEKRLAHLFIEWLIKGGHKSGKPPPK

SEQ ID NO: 353 - protein, 39 aa, Artificial Sequence
  GLP Peptide
HGEGTFTSDKSKLLEKRLAHLFIEWLIKGGHSKGKPPPK

SEQ ID NO: 354 - protein, 39 aa, Artificial Sequence
  GLP Peptide
HGEGTFTSDKSKLLEKRLAHLFIEWLIKGGHSSIKPPPK

SEQ ID NO: 355 - protein, 39 aa, Artificial Sequence
  GLP Peptide
HGEGTFTSDKSKLLEKRLAHLFIEWLLAGGHSKGKPPPK

SEQ ID NO: 356 - protein, 37 aa, Artificial Sequence
  GLP Peptide
HGEGTFTSDKSKQLAEEAVQLFIEWLLAGGPKKIRYS

SEQ ID NO: 357 - protein, 37 aa, Artificial Sequence
  GLP Peptide
HGEGTFTSDKSKQLAEEAVQLFIEWLLAGGPSKEIIS

SEQ ID NO: 358 - protein, 37 aa, Artificial Sequence
  GLP Peptide
HGEGTFTSDKSKQLAERAVQLFIEWLLAGGPKKIRYS

SEQ ID NO: 359 - protein, 39 aa, Artificial Sequence
  GLP Peptide
HGEGTFTSDKSKQLAERLAKLFIEWLIAGGHSSGKPPPK

SEQ ID NO: 360 - protein, 39 aa, Artificial Sequence
  GLP Peptide
HGEGTFTSDKSKQLAERLAREFIEWLIAGGHSSGKPPPK

SEQ ID NO: 361 - protein, 39 aa, Artificial Sequence
  GLP Peptide
HGEGTFTSDKSKQLAERLVKLFIEWLIAGGHSSGKPPPK

SEQ ID NO: 362 - protein, 37 aa, Artificial Sequence
  GLP Peptide
HGEGTFTSDKSKQLAERLVQLFIEWLLAGGPKKIRYS

SEQ ID NO: 363 - protein, 39 aa, Artificial Sequence
  GLP Peptide
HGEGTFTSDKSKQLAERLVREFIEWLIAGGHSSGKPPPK

SEQ ID NO: 364 - protein, 39 aa, Artificial Sequence
  GLP Peptide
HGEGTFTSDKSKQLAERLVRLFIEWLIAGGHSSGKPPPK

SEQ ID NO: 365 - protein, 37 aa, Artificial Sequence
  GLP Peptide
HGEGTFTSDKSKQLAKEAVQLFIEWLLAGGPKKIRYS

SEQ ID NO: 366 - protein, 37 aa, Artificial Sequence
  GLP Peptide
HGEGTFTSDKSKQLAKELVQLFIEWLLAGGPKKIRYS

SEQ ID NO: 367 - protein, 37 aa, Artificial Sequence
  GLP Peptide
HGEGTFTSDKSKQLAKRAVQLFIEWLLAGGPKKIRYS

SEQ ID NO: 368 - protein, 39 aa, Artificial Sequence
  GLP Peptide
HGEGTFTSDKSKQLAKRLAHLFIEWLIAGGHSSGKPPPK

SEQ ID NO: 369 - protein, 39 aa, Artificial Sequence
  GLP Peptide
HGEGTFTSDKSKQLAKRLAQEFIEWLIKGGHSSGKPPPK

SEQ ID NO: 370 - protein, 37 aa, Artificial Sequence
  GLP Peptide
HGEGTFTSDKSKQLAKRLVQLFIEWLLAGGPKKIRYS

SEQ ID NO: 371 - protein, 39 aa, Artificial Sequence
  GLP Peptide
HGEGTFTSDKSKQLAKRLVREFIEWLIEGGHSSGKPPPK

SEQ ID NO: 372 - protein, 39 aa, Artificial Sequence
  GLP Peptide
HGEGTFTSDKSKQLAKRLVREFIEWLIKGGHSSGKPPPK

SEQ ID NO: 373 - protein, 39 aa, Artificial Sequence
  GLP Peptide
HGEGTFTSDKSKQLAKRLVRHFIEWLIKGGHSSGKPPPK

SEQ ID NO: 374 - protein, 39 aa, Artificial Sequence
  GLP Peptide
HGEGTFTSDKSKQLAKRLVRLFIEWLIAGGHSSGKPPPK

SEQ ID NO: 375 - protein, 39 aa, Artificial Sequence
  GLP Peptide
HGEGTFTSDKSKQLAKRLVRLFIEWLIKGGHSSGKPPPS

SEQ ID NO: 376 - protein, 39 aa, Artificial Sequence
  GLP Peptide
HGEGTFTSDKSKQLAKRLVRLFIEWLIKGGPSSGAPPPS

SEQ ID NO: 377 - protein, 39 aa, Artificial Sequence
  GLP Peptide
HGEGTFTSDKSKQLAKRLVRLFVQWLIKGGHSSGKPPPK

SEQ ID NO: 378 - protein, 39 aa, Artificial Sequence
  GLP Peptide
HGEGTFTSDKSKQLDEQRAKEFIEWLKAGGHPSGKPPPK

SEQ ID NO: 379 - protein, 39 aa, Artificial Sequence
  GLP Peptide
HGEGTFTSDKSKQLEEELARLFYEWLIAGGHSKGKPPPK

SEQ ID NO: 380 - protein, 39 aa, Artificial Sequence
  GLP Peptide
HGEGTFTSDKSKQLEEELVRLFYEWLIKGGHSSIKPPPK

SEQ ID NO: 381 - protein, 39 aa, Artificial Sequence
  GLP Peptide
HGEGTFTSDKSKQLEEELVRLFYEWLINGGHSKGKPPPK

SEQ ID NO: 382 - protein, 39 aa, Artificial Sequence
  GLP Peptide
HGEGTFTSDKSKQLEEELVRLFYEWLINGGHSSIKPPPK

SEQ ID NO: 383 - protein, 39 aa, Artificial Sequence
  GLP Peptide
HGEGTFTSDKSKQLEEELVRLFYEWLLAGGHSSIKPPPK

SEQ ID NO: 384 - protein, 39 aa, Artificial Sequence
  GLP Peptide
HGEGTFTSDKSKQLEERLARLFYEWLIAGGHSKIKPPPK

SEQ ID NO: 385 - protein, 39 aa, Artificial Sequence
  GLP Peptide
HGEGTFTSDKSKQLEERLARLFYEWLINGGHSSIKPPPK

SEQ ID NO: 386 - protein, 39 aa, Artificial Sequence
  GLP Peptide
HGEGTFTSDKSKQLEERLARLFYEWLKAGGHSKGKPPPK

SEQ ID NO: 387 - protein, 39 aa, Artificial Sequence
  GLP Peptide
HGEGTFTSDKSKQLEERLARLFYEWLKAGGHSSIKPPPK

SEQ ID NO: 388 - protein, 39 aa, Artificial Sequence
  GLP Peptide
HGEGTFTSDKSKQLEKEAVRLFYEWLKAGGHSKGKPPPK

SEQ ID NO: 389 - protein, 39 aa, Artificial Sequence
  GLP Peptide
HGEGTFTSDKSKQLEKELVRLFYEWLINGGHSKIKPPPK

SEQ ID NO: 390 - protein, 39 aa, Artificial Sequence
  GLP Peptide
HGEGTFTSDKSKQLEKELVRLFYEWLINGGHSSIRPPPK

SEQ ID NO: 391 - protein, 39 aa, Artificial Sequence
  GLP Peptide
HGEGTFTSDKSKQLEKELVRLFYEWLINGGPSKGKPPPK

SEQ ID NO: 392 - protein, 39 aa, Artificial Sequence
  GLP Peptide
HGEGTFTSDKSKQLEKELVRLFYEWLINGGPSSIKPPPK

SEQ ID NO: 393 - protein, 39 aa, Artificial Sequence
  GLP Peptide
HGEGTFTSDKSKQLEKELVRLFYEWLKAGGHSKIKPPPK

SEQ ID NO: 394 - protein, 39 aa, Artificial Sequence
  GLP Peptide
HGEGTFTSDKSKQLEKELVRLFYEWLKAGGHSKQKPPPK

SEQ ID NO: 395 - protein, 39 aa, Artificial Sequence
  GLP Peptide
HGEGTFTSDKSKQLEKELVRLFYEWLKKGGHSSIKPPPK

SEQ ID NO: 396 - protein, 39 aa, Artificial Sequence
  GLP Peptide
HGEGTFTSDKSKQLEKELVRLFYEWLKNGGHSKGKPPPK

SEQ ID NO: 397 - protein, 39 aa, Artificial Sequence
  GLP Peptide
HGEGTFTSDKSKQLEKELVRLFYEWLKNGGHSSIKPPPK

SEQ ID NO: 398 - protein, 39 aa, Artificial Sequence
  GLP Peptide
HGEGTFTSDKSKQLEKELVRLFYEWLLAGGHSKIKPPPK

SEQ ID NO: 399 - protein, 39 aa, Artificial Sequence
  GLP Peptide
HGEGTFTSDKSKQLEKRAVRLFFEWLKAGGHSSIKPPPK

SEQ ID NO: 400 - protein, 39 aa, Artificial Sequence
  GLP Peptide
HGEGTFTSDKSKQLEKRAVRLFYEWLKAGGHSKIKPPPK

SEQ ID NO: 401 - protein, 39 aa, Artificial Sequence
  GLP Peptide
HGEGTFTSDKSKQLEKRLARLFFEWLIAGGHSKIKPPPK

SEQ ID NO: 402 - protein, 39 aa, Artificial Sequence
  GLP Peptide
HGEGTFTSDKSKQLEKRLARLFFEWLKAGGHSKGKPPPK

SEQ ID NO: 403 - protein, 39 aa, Artificial Sequence
  GLP Peptide
HGEGTFTSDKSKQLEKRLARLFFEWLKAGGHSSIKPPPK

SEQ ID NO: 404 - protein, 39 aa, Artificial Sequence
  GLP Peptide
HGEGTFTSDKSKQLEKRLARLFYEWLIAGGHSKIRPPPK

SEQ ID NO: 405 - protein, 39 aa, Artificial Sequence
  GLP Peptide
HGEGTFTSDKSKQLEKRLARLFYEWLIAGGPSKIKPPPK

SEQ ID NO: 406 - protein, 39 aa, Artificial Sequence
  GLP Peptide
HGEGTFTSDKSKQLEKRLARLFYEWLKAGGHKKGKPPPK

SEQ ID NO: 407 - protein, 39 aa, Artificial Sequence
  GLP Peptide
HGEGTFTSDKSKQLEKRLARLFYEWLKAGGHSKGKPPPK

SEQ ID NO: 408 - protein, 39 aa, Artificial Sequence
  GLP Peptide
HGEGTFTSDKSKQLEKRLARLFYEWLKAGGHSKIKPPPK

SEQ ID NO: 409 - protein, 39 aa, Artificial Sequence
  GLP Peptide
HGEGTFTSDKSKQLEKRLARLFYEWLKAGGHSSIKPPPK

SEQ ID NO: 410 - protein, 39 aa, Artificial Sequence
  GLP Peptide
HGEGTFTSDKSKQLEKRLARLFYEWLKAGGHSSIRPPPK

SEQ ID NO: 411 - protein, 39 aa, Artificial Sequence
  GLP Peptide
HGEGTFTSDKSKQLEKRLARLFYEWLKAGGPSKGKPPPK

SEQ ID NO: 412 - protein, 39 aa, Artificial Sequence
  GLP Peptide
HGEGTFTSDKSKQLEKRLARLFYEWLKAGGPSSIKPPPK

SEQ ID NO: 413 - protein, 39 aa, Artificial Sequence
  GLP Peptide
HGEGTFTSDKSKQLEKRLARLFYEWLLAGGHSKIKPPPK

SEQ ID NO: 414 - protein, 39 aa, Artificial Sequence
  GLP Peptide
HGEGTFTSDKSKQLEKRLFRLFIEWLIAGGHSSGKPPPK

SEQ ID NO: 415 - protein, 39 aa, Artificial Sequence
  GLP Peptide
HGEGTFTSDKSKQLEKRLVILFIEWLIAGGHSSGKPPPK

SEQ ID NO: 416 - protein, 39 aa, Artificial Sequence
  GLP Peptide
HGEGTFTSDKSKQLEKRLVRIFIEWLIAGGHSSGKPPPK

SEQ ID NO: 417 - protein, 39 aa, Artificial Sequence
  GLP Peptide
HGEGTFTSDKSKQLEKRLVRLFFEWLIAGGHSSGKPPPK

SEQ ID NO: 418 - protein, 39 aa, Artificial Sequence
  GLP Peptide
HGEGTFTSDKSKQLEKRLVRLFFEWLIKGGHSKIKPPPK

SEQ ID NO: 419 - protein, 39 aa, Artificial Sequence
  GLP Peptide
HGEGTFTSDKSKQLEKRLVRLFFEWLINGGHSKIKPPPK

SEQ ID NO: 420 - protein, 39 aa, Artificial Sequence
  GLP Peptide
HGEGTFTSDKSKQLEKRLVRLFFEWLKKGGHSKGKPPPK

SEQ ID NO: 421 - protein, 39 aa, Artificial Sequence
  GLP Peptide
HGEGTFTSDKSKQLEKRLVRLFFEWLKKGGHSSIKPPPK

SEQ ID NO: 422 - protein, 39 aa, Artificial Sequence
  GLP Peptide
HGEGTFTSDKSKQLEKRLVRLFFEWLKNGGHSKGKPPPK

SEQ ID NO: 423 - protein, 39 aa, Artificial Sequence
  GLP Peptide
HGEGTFTSDKSKQLEKRLVRLFFEWLKNGGHSSIKPPPK

SEQ ID NO: 424 - protein, 39 aa, Artificial Sequence
  GLP Peptide
HGEGTFTSDKSKQLEKRLVRLFHEWLIAGGHSSGKPPPK

SEQ ID NO: 425 - protein, 39 aa, Artificial Sequence
  GLP Peptide
HGEGTFTSDKSKQLEKRLVRLFIELLIAGGHSSGKPPPK

SEQ ID NO: 426 - protein, 38 aa, Artificial Sequence
  GLP Peptide
HGEGTFTSDKSKQLEKRLVRLFIEWLIAVGHSGKPPPK

SEQ ID NO: 427 - protein, 39 aa, Artificial Sequence
  GLP Peptide
HGEGTFTSDKSKQLEKRLVRLFILWLIAGGHSSGKPPPK

SEQ ID NO: 428 - protein, 39 aa, Artificial Sequence
  GLP Peptide
HGEGTFTSDKSKQLEKRLVRLFIYWLIAGGHSSGKPPPK

SEQ ID NO: 429 - protein, 39 aa, Artificial Sequence
  GLP Peptide
HGEGTFTSDKSKQLEKRLVRLFYEWLIAGGHSSGKPPPK

SEQ ID NO: 430 - protein, 39 aa, Artificial Sequence
  GLP Peptide
HGEGTFTSDKSKQLEKRLVRLFYEWLIKGGHSKIKPPPK

SEQ ID NO: 431 - protein, 39 aa, Artificial Sequence
  GLP Peptide
HGEGTFTSDKSKQLEKRLVRLFYEWLIKGGHSKIRPPPK

SEQ ID NO: 432 - protein, 39 aa, Artificial Sequence
  GLP Peptide
HGEGTFTSDKSKQLEKRLVRLFYEWLINGGHKKIKPPPK

SEQ ID NO: 433 - protein, 39 aa, Artificial Sequence
  GLP Peptide
HGEGTFTSDKSKQLEKRLVRLFYEWLINGGHSKIKPPPK

SEQ ID NO: 434 - protein, 39 aa, Artificial Sequence
  GLP Peptide
HGEGTFTSDKSKQLEKRLVRLFYEWLINGGHSKIRPPPK

SEQ ID NO: 435 - protein, 39 aa, Artificial Sequence
  GLP Peptide
HGEGTFTSDKSKQLEKRLVRLFYEWLKAGGHSKIKYPPK

SEQ ID NO: 436 - protein, 39 aa, Artificial Sequence
  GLP Peptide
HGEGTFTSDKSKQLEKRLVRLLIEWLIAGGHSSGKPPPK

SEQ ID NO: 437 - protein, 39 aa, Artificial Sequence
  GLP Peptide
HGEGTFTSDKSKQLEKRRVRLFFEWLKAGGHSSIKPPPK

SEQ ID NO: 438 - protein, 39 aa, Artificial Sequence
  GLP Peptide
HGEGTFTSDKSKQLEKRRVRLFYEWLKAGGHSKIKPPPK

SEQ ID NO: 439 - protein, 39 aa, Artificial Sequence
  GLP Peptide
HGEGTFTSDKSQLLEERLAHLFIEWLIAGGHSKQKPPPK

SEQ ID NO: 440 - protein, 39 aa, Artificial Sequence
  GLP Peptide
HGEGTFTSDKSQLLEERLAHLFIEWLIAGGHSSGRPPPK

SEQ ID NO: 441 - protein, 39 aa, Artificial Sequence
  GLP Peptide
HGEGTFTSDKSQLLEERLAHLFIEWLIKGGHSSIKPPPK

SEQ ID NO: 442 - protein, 39 aa, Artificial Sequence
  GLP Peptide
HGEGTFTSDKSQLLEERLVHLFIEWLIAGGHSSGKLPPK

SEQ ID NO: 443 - protein, 39 aa, Artificial Sequence
  GLP Peptide
HGEGTFTSDKSQLLEKEAAHLFIEWLIAGGHSKGKPPPK

SEQ ID NO: 444 - protein, 39 aa, Artificial Sequence
  GLP Peptide
HGEGTFTSDKSQLLEKEAAHLFIEWLIAGGHSSIKPPPK

SEQ ID NO: 445 - protein, 39 aa, Artificial Sequence
  GLP Peptide
HGEGTFTSDKSQLLEKELAHLFIEWLIAGGHSKGRPPPK

SEQ ID NO: 446 - protein, 39 aa, Artificial Sequence
  GLP Peptide
HGEGTFTSDKSQLLEKELAHLFIEWLIAGGHSKQKPPPK

SEQ ID NO: 447 - protein, 39 aa, Artificial Sequence
  GLP Peptide
HGEGTFTSDKSQLLEKELAHLFIEWLIAGGHSSIKPPPK

SEQ ID NO: 448 - protein, 39 aa, Artificial Sequence
  GLP Peptide
HGEGTFTSDKSQLLEKELAHLFIEWLIAGGHSSIRPPPK

SEQ ID NO: 449 - protein, 39 aa, Artificial Sequence
  GLP Peptide
HGEGTFTSDKSQLLEKELAHLFIEWLLAGGHSKGKPPPK

SEQ ID NO: 450 - protein, 39 aa, Artificial Sequence
  GLP Peptide
HGEGTFTSDKSQLLEKRAAHLFIEWLIAGGHKKGKPPPK

SEQ ID NO: 451 - protein, 39 aa, Artificial Sequence
  GLP Peptide
HGEGTFTSDKSQLLEKRAAHLFIEWLIAGGHSKGRPPPK

SEQ ID NO: 452 - protein, 39 aa, Artificial Sequence
  GLP Peptide
HGEGTFTSDKSQLLEKRAAHLFIEWLIAGGHSSGKLSPK

SEQ ID NO: 453 - protein, 39 aa, Artificial Sequence
  GLP Peptide
HGEGTFTSDKSQLLEKRAAHLFIEWLIAGGHSSGRYPPK

SEQ ID NO: 454 - protein, 39 aa, Artificial Sequence
  GLP Peptide
HGEGTFTSDKSQLLEKRAAHLFIEWLIAGGPSKGKPPPK

SEQ ID NO: 455 - protein, 39 aa, Artificial Sequence
  GLP Peptide
HGEGTFTSDKSQLLEKRAAHLFIEWLIAGGPSSGKLPPK

SEQ ID NO: 456 - protein, 39 aa, Artificial Sequence
  GLP Peptide
HGEGTFTSDKSQLLEKRAAHLFIEWLIKGGHSKGKPPPK

SEQ ID NO: 457 - protein, 39 aa, Artificial Sequence
  GLP Peptide
HGEGTFTSDKSQLLEKRAAHLFIEWLIKGGHSSIKPPPK

SEQ ID NO: 458 - protein, 39 aa, Artificial Sequence
  GLP Peptide
HGEGTFTSDKSQLLEKRAAHLFIEWLLAGGHSSIKPPPK

SEQ ID NO: 459 - protein, 39 aa, Artificial Sequence
  GLP Peptide
HGEGTFTSDKSQLLEKRLAHLFIEWLIAGGHKKGKYPPK

SEQ ID NO: 460 - protein, 39 aa, Artificial Sequence
  GLP Peptide
HGEGTFTSDKSQLLEKRLAHLFIEWLIAGGHKSGKYSPK

SEQ ID NO: 461 - protein, 39 aa, Artificial Sequence
  GLP Peptide
HGEGTFTSDKSQLLEKRLAHLFIEWLIAGGHSKGRLPPK

SEQ ID NO: 462 - protein, 39 aa, Artificial Sequence
  GLP Peptide
HGEGTFTSDKSQLLEKRLAHLFIEWLIAGGHSKIKYPPK

SEQ ID NO: 463 - protein, 39 aa, Artificial Sequence
  GLP Peptide
HGEGTFTSDKSQLLEKRLAHLFIEWLIAGGHSSGRLSPK

SEQ ID NO: 464 - protein, 39 aa, Artificial Sequence
  GLP Peptide
HGEGTFTSDKSQLLEKRLAHLFIEWLIAGGHSSGRYSPK

SEQ ID NO: 465 - protein, 39 aa, Artificial Sequence
  GLP Peptide
HGEGTFTSDKSQLLEKRLAHLFIEWLIAGGHSSIKPPPK

SEQ ID NO: 466 - protein, 39 aa, Artificial Sequence
  GLP Peptide
HGEGTFTSDKSQLLEKRLAHLFIEWLIAGGPSKGKPPPK

SEQ ID NO: 467 - protein, 39 aa, Artificial Sequence
  GLP Peptide
HGEGTFTSDKSQLLEKRLAHLFIEWLIAGGPSKGRPPPK

SEQ ID NO: 468 - protein, 39 aa, Artificial Sequence
  GLP Peptide
HGEGTFTSDKSQLLEKRLAHLFIEWLIAGGPSSGKYSPK

SEQ ID NO: 469 - protein, 39 aa, Artificial Sequence
  GLP Peptide
HGEGTFTSDKSQLLEKRLAHLFIEWLIAGGPSSGRYPPK

SEQ ID NO: 470 - protein, 39 aa, Artificial Sequence
  GLP Peptide
HGEGTFTSDKSQLLEKRLAHLFIEWLIKGGHSKGKPPPK

SEQ ID NO: 471 - protein, 39 aa, Artificial Sequence
  GLP Peptide
HGEGTFTSDKSQLLEKRLAHLFIEWLIKGGHSKGKYPPK

SEQ ID NO: 472 - protein, 39 aa, Artificial Sequence
  GLP Peptide
HGEGTFTSDKSQLLEKRLAHLFIEWLIKGGHSKGRPPPK

SEQ ID NO: 473 - protein, 39 aa, Artificial Sequence
  GLP Peptide
HGEGTFTSDKSQLLEKRLAHLFIEWLIKGGHSKQKPPPK

SEQ ID NO: 474 - protein, 39 aa, Artificial Sequence
  GLP Peptide
HGEGTFTSDKSQLLEKRLAHLFIEWLIKGGHSSGKPPPK

SEQ ID NO: 475 - protein, 39 aa, Artificial Sequence
  GLP Peptide
HGEGTFTSDKSQLLEKRLAHLFIEWLIKGGHSSGRPPPK

SEQ ID NO: 476 - protein, 39 aa, Artificial Sequence
  GLP Peptide
HGEGTFTSDKSQLLEKRLAHLFIEWLIKGGHSSIRPPPK

SEQ ID NO: 477 - protein, 39 aa, Artificial Sequence
  GLP Peptide
HGEGTFTSDKSQLLEKRLAHLFIEWLIKGGPSSIKPPPK

SEQ ID NO: 478 - protein, 39 aa, Artificial Sequence
  GLP Peptide
HGEGTFTSDKSQLLEKRLAHLFIEWLLAGGHKKGKPPPK

SEQ ID NO: 479 - protein, 39 aa, Artificial Sequence
  GLP Peptide
HGEGTFTSDKSQLLEKRLAHLFIEWLLAGGHSSGKLSPK

SEQ ID NO: 480 - protein, 39 aa, Artificial Sequence
  GLP Peptide
HGEGTFTSDKSQLLEKRLAHLFIEWLLAGGHSSIKPPPK

SEQ ID NO: 481 - protein, 39 aa, Artificial Sequence
  GLP Peptide
HGEGTFTSDKSQLLEKRLAHLFIEWLLAGGHSSIRPPPK

SEQ ID NO: 482 - protein, 39 aa, Artificial Sequence
  GLP Peptide
HGEGTFTSDKSQLLEKRLAHLFIEWLLAGGPSSGKPPPK

SEQ ID NO: 483 - protein, 39 aa, Artificial Sequence
  GLP Peptide
HGEGTFTSDKSQLLEKRLAHLFIEWLLAGGPSSGRPPPK

SEQ ID NO: 484 - protein, 39 aa, Artificial Sequence
  GLP Peptide
HGEGTFTSDKSQLLEKRLAHLFIEWLLKGGHSKGKPPPK

SEQ ID NO: 485 - protein, 39 aa, Artificial Sequence
  GLP Peptide
HGEGTFTSDKSQLLEKRLAHLFIEWLLKGGHSSGRPPPK

SEQ ID NO: 486 - protein, 39 aa, Artificial Sequence
  GLP Peptide
HGEGTFTSDKSQQLEEELVRLFYEWLIAGGHSKGKPPPK

SEQ ID NO: 487 - protein, 39 aa, Artificial Sequence
  GLP Peptide
HGEGTFTSDKSQQLEEELVRLFYEWLIAGGHSSIKPPPK

SEQ ID NO: 488 - protein, 39 aa, Artificial Sequence
  GLP Peptide
HGEGTFTSDKSQQLEKELVRLFFEWLIAGGHSKGKPPPK

SEQ ID NO: 489 - protein, 39 aa, Artificial Sequence
  GLP Peptide
HGEGTFTSDKSQQLEKELVRLFFEWLIAGGHSSIKPPPK

SEQ ID NO: 490 - protein, 39 aa, Artificial Sequence
  GLP Peptide
HGEGTFTSDKSQQLEKELVRLFYEWLIAGGHSKIKPPPK

SEQ ID NO: 491 - protein, 39 aa, Artificial Sequence
  GLP Peptide
HGEGTFTSDKSQQLEKELVRLFYEWLKAGGHSKGKPPPK

SEQ ID NO: 492 - protein, 39 aa, Artificial Sequence
  GLP Peptide
HGEGTFTSDKSQQLEKELVRLFYEWLKAGGHSSIKPPPK

SEQ ID NO: 493 - protein, 39 aa, Artificial Sequence
  GLP Peptide
HGEGTFTSDKSQQLEKELVRLFYEWLLAGGHSSIKPPPK

SEQ ID NO: 494 - protein, 39 aa, Artificial Sequence
  GLP Peptide
HGEGTFTSDKSQQLEKRLARLFYEWLIAGGHSKIKPPPK

SEQ ID NO: 495 - protein, 39 aa, Artificial Sequence
  GLP Peptide
HGEGTFTSDKSQQLEKRLARLFYEWLKAGGHSKGKPPPK

SEQ ID NO: 496 - protein, 39 aa, Artificial Sequence
  GLP Peptide
HGEGTFTSDKSQQLEKRLARLFYEWLKAGGHSSIKPPPK

SEQ ID NO: 497 - protein, 39 aa, Artificial Sequence
  GLP Peptide
HGEGTFTSDKSQQLEKRLVRLFYEWLIKGGHSKIKPPPK

SEQ ID NO: 498 - protein, 39 aa, Artificial Sequence
  GLP Peptide
HGEGTFTSDKSQQLEKRLVRLFYEWLINGGHSKIKPPPK

SEQ ID NO: 499 - protein, 39 aa, Artificial Sequence
  GLP Peptide
HGEGTFTSDKSQQLEKRLVRLFYEWLINGGHSSIRPPPK

SEQ ID NO: 500 - protein, 39 aa, Artificial Sequence
  GLP Peptide
HGEGTFTSDKSQQLEKRLVRLFYEWLKKGGHSKGKPPPK

SEQ ID NO: 501 - protein, 39 aa, Artificial Sequence
  GLP Peptide
HGEGTFTSDKSQQLEKRLVRLFYEWLKKGGHSSIKPPPK

SEQ ID NO: 502 - protein, 39 aa, Artificial Sequence
  GLP Peptide
HGEGTFTSDKSQQLEKRLVRLFYEWLKNGGHSKGKPPPK

SEQ ID NO: 503 - protein, 39 aa, Artificial Sequence
  GLP Peptide
HGEGTFTSDKSQQLEKRLVRLFYEWLKNGGHSSIKPPPK

SEQ ID NO: 504 - protein, 39 aa, Artificial Sequence
  GLP Peptide
HGEGTFTSDKSQQLEKRRVRLFYEWLKAGGHSKGKPPPK

SEQ ID NO: 505 - protein, 39 aa, Artificial Sequence
  GLP Peptide
HGEGTFTSDLSILLDEEAVQLFIEWLLATGPSSGAPPPS

SEQ ID NO: 506 - protein, 39 aa, Artificial Sequence
  GLP Peptide
HGEGTFTSDLSILLDEEAVQLFIEWLLATGPVSGAPPPS

SEQ ID NO: 507 - protein, 39 aa, Artificial Sequence
  GLP Peptide
HGEGTFTSDLSILLDEEAVREFIEWLLATGPSSGAPPPS

SEQ ID NO: 508 - protein, 39 aa, Artificial Sequence
  GLP Peptide
HGEGTFTSDLSILLDEEAVRLFIEWLLATGPSSGAPPPS

SEQ ID NO: 509 - protein, 39 aa, Artificial Sequence
  GLP Peptide
HGEGTFTSDLSILLDEEAVRLFIEWLLATGPVSGAPPPS

SEQ ID NO: 510 - protein, 39 aa, Artificial Sequence
  GLP Peptide
HGEGTFTSDLSILLEEEAVREFIEWLLATGPSSGAPPPS

SEQ ID NO: 511 - protein, 39 aa, Artificial Sequence
  GLP Peptide
HGEGTFTSDLSILLEEEAVRLFIEWLLATGPSSGAPPPS

SEQ ID NO: 512 - protein, 39 aa, Artificial Sequence
  GLP Peptide
HGEGTFTSDLSILLEEEAVRLFIEWLLATGPVSGAPPPS

SEQ ID NO: 513 - protein, 39 aa, Artificial Sequence
  GLP Peptide
HGEGTFTSDLSIQLAKRLAQLFIEWLIKGGHSSGKPPPK

SEQ ID NO: 514 - protein, 39 aa, Artificial Sequence
  GLP Peptide
HGEGTFTSDLSIQLDEEAVQEFIEWLLATGPSSGAPPPS

SEQ ID NO: 515 - protein, 39 aa, Artificial Sequence
  GLP Peptide
HGEGTFTSDLSIQLDEEAVQLFIEWLLATGPSSGAPPPS

SEQ ID NO: 516 - protein, 39 aa, Artificial Sequence
  GLP Peptide
HGEGTFTSDLSIQLDEEAVQLFIEWLLATGPVSGAPPPS

SEQ ID NO: 517 - protein, 39 aa, Artificial Sequence
  GLP Peptide
HGEGTFTSDLSIQLDEEAVREFIEWLLATGPVSGAPPPS

SEQ ID NO: 518 - protein, 39 aa, Artificial Sequence
  GLP Peptide
HGEGTFTSDLSIQLDEEAVRLFIEWLEATGPVSGAPPPS

SEQ ID NO: 519 - protein, 39 aa, Artificial Sequence
  GLP Peptide
HGEGTFTSDLSIQLDEEAVRLFIEWLLATGPVSGAPPPS

SEQ ID NO: 520 - protein, 39 aa, Artificial Sequence
  GLP Peptide
HGEGTFTSDLSIQLEEEAVQEFIEWLLATGPVSGAPPPS

SEQ ID NO: 521 - protein, 39 aa, Artificial Sequence
  GLP Peptide
HGEGTFTSDLSIQLEEEAVQLFIEWLLATGPSSGAPPPS

SEQ ID NO: 522 - protein, 39 aa, Artificial Sequence
  GLP Peptide
HGEGTFTSDLSIQLEEEAVQLFIEWLLATGPVSGAPPPS

SEQ ID NO: 523 - protein, 39 aa, Artificial Sequence
  GLP Peptide
HGEGTFTSDLSKQLAERLVRLFIEWLIKGGHSSGKPPPK

SEQ ID NO: 524 - protein, 39 aa, Artificial Sequence
  GLP Peptide
HGEGTFTSDLSKQLAKRLVREFIEWLIEGGHSSGKPPPK

SEQ ID NO: 525 - protein, 39 aa, Artificial Sequence
  GLG Peptide
HGEGTFTSDLSKQLAKRLVREFIEWLIEGGPSSGAPPPS

SEQ ID NO: 526 - protein, 39 aa, Artificial Sequence
  GLP Peptide
HGEGTFTSDLSKQLAKRLVREFIEWLIKGGHSSGKPPPK

SEQ ID NO: 527 - protein, 39 aa, Artificial Sequence
  GLP Peptide
HGEGTFTSDLSKQLAKRLVRLFIEWLIKGGHSSGKPPPK

SEQ ID NO: 528 - protein, 39 aa, Artificial Sequence
  GLP Peptide
HGEGTFTSDLSKQLEEEAVQLFIEWLLATGPSSGAPPPS

SEQ ID NO: 529 - protein, 39 aa, Artificial Sequence
  GLP Peptide
HGEGTFTSDLSKQLEEEAVQLFIEWLLATGPSSGEPPPK

SEQ ID NO: 530 - protein, 40 aa, Artificial Sequence
  GLP Peptide
HGEGTFTSDLSKQLEEEAVQLFIEWLLATGPSSGEPPPKS

SEQ ID NO: 531 - protein, 39 aa, Artificial Sequence
  GLP Peptide
HGEGTFTSDLSKQLEEEAVQLFIEWLLATGPSSGKPPPE

SEQ ID NO: 532 - protein, 40 aa, Artificial Sequence
  GLP Peptide
HGEGTFTSDLSKQLEEEAVQLFIEWLLATGPSSGKPPPES

SEQ ID NO: 533 - protein, 39 aa, Artificial Sequence
  GLP Peptide
HGEGTFTSDLSKQLEEEAVQLFIEWLLATGPSSGKPPPK

SEQ ID NO: 534 - protein, 40 aa, Artificial Sequence
  GLP Peptide
HGEGTFTSDLSKQLEEEAVQLFIEWLLATGPSSGKPPPKS

SEQ ID NO: 535 - protein, 39 aa, Artificial Sequence
  GLP Peptide
HGEGTFTSDLSKQLEEEAVQLFIEWLLNGGPSSGAPPPE

SEQ ID NO: 536 - protein, 39 aa, Artificial Sequence
  GLP Peptide
HGEGTFTSDLSKQLEEEAVRLFIEWLLATGPSSGEPPPE

SEQ ID NO: 537 - protein, 39 aa, Artificial Sequence
  GLP Peptide
HGEGTFTSDLSKQLEERLARLFYEWLIAGGHSSQKPPPK

SEQ ID NO: 538 - protein, 39 aa, Artificial Sequence
  GLP Peptide
HGEGTFTSDLSKQLEKELVRLFYEWLIAGGHKSQKPPPK

SEQ ID NO: 539 - protein, 39 aa, Artificial Sequence
  GLP Peptide
HGEGTFTSDLSKQLEKELVRLFYEWLIAGGHSSQRPPPK

SEQ ID NO: 540 - protein, 39 aa, Artificial Sequence
  GLP Peptide
HGEGTFTSDLSKQLEKELVRLFYEWLIKGGHKSGKPPPK

SEQ ID NO: 541 - protein, 39 aa, Artificial Sequence
  GLP Peptide
HGEGTFTSDLSKQLEKELVRLFYEWLIKGGHSKGKPPPK

SEQ ID NO: 542 - protein, 39 aa, Artificial Sequence
  GLP Peptide
HGEGTFTSDLSKQLEKELVRLFYEWLIKGGHSSGRPPPK

SEQ ID NO: 543 - protein, 39 aa, Artificial Sequence
  GLP Peptide
HGEGTFTSDLSKQLEKELVRLFYEWLIKGGHSSIKPPPK

SEQ ID NO: 544 - protein, 39 aa, Artificial Sequence
  GLP Peptide
HGEGTFTSDLSKQLEKELVRLFYEWLIKGGHSSQKPPPK

SEQ ID NO: 545 - protein, 39 aa, Artificial Sequence
  GLP Peptide
HGEGTFTSDLSKQLEKELVRLFYEWLINGGHKSGKPPPK

SEQ ID NO: 546 - protein, 39 aa, Artificial Sequence
  GLP Peptide
HGEGTFTSDLSKQLEKELVRLFYEWLINGGHSKGKPPPK

SEQ ID NO: 547 - protein, 39 aa, Artificial Sequence
  GLP Peptide
HGEGTFTSDLSKQLEKELVRLFYEWLINGGHSSGKPPPK

SEQ ID NO: 548 - protein, 39 aa, Artificial Sequence
  GLP Peptide
HGEGTFTSDLSKQLEKELVRLFYEWLINGGHSSQKPPPK

SEQ ID NO: 549 - protein, 39 aa, Artificial Sequence
  GLP Peptide
HGEGTFTSDLSKQLEKELVRLFYEWLINGGPSSGKPPPK

SEQ ID NO: 550 - protein, 39 aa, Artificial Sequence
  GLP Peptide
HGEGTFTSDLSKQLEKELVRLFYEWLKAGGHSSGKPPPK

SEQ ID NO: 551 - protein, 39 aa, Artificial Sequence
  GLP Peptide
HGEGTFTSDLSKQLEKRLVRLFYEWLKNGGHSSGKPPPK

SEQ ID NO: 552 - protein, 39 aa, Artificial Sequence
  GLP Peptide
HGEGTFTSDLSKQLEKRLVRLFYEWLLNGGHSSQKPPPK

SEQ ID NO: 553 - protein, 39 aa, Artificial Sequence
  GLP Peptide
HGEGTFTSDLSKQMEEEAVRLFIEWLKNGGPSSGAPPPS

SEQ ID NO: 554 - protein, 39 aa, Artificial Sequence
  GLP Peptide
HSEGTFTSDKSKQLAKRLVRLFIEWLIKGGHSSGKPPPK

SEQ ID NO: 555 - protein, 39 aa, Artificial Sequence
  GLP Peptide
HSQGTFTSDLSKQLESRRARRFIEWLLATGPESGAPPPS

SEQ ID NO: 556 - protein, 39 aa, Artificial Sequence
  GLP Peptide
YGEGTFTSDKSKLLEKRLAHLFIEWLIAGGHSSGKPPPK

SEQ ID NO: 557 - protein, 39 aa, Artificial Sequence
  GLP Peptide
YGEGTFTSDKSKLLEKRLVRLFIEWLIAGGHSSGKPPPK

SEQ ID NO: 558 - protein, 39 aa, Artificial Sequence
  GLP Peptide
YGEGTFTSDKSKQLEKRLVRLFIEWLIAGGHSSGKPPPK

SEQ ID NO: 559 - protein, 39 aa, Artificial Sequence
  GLP Peptide
YGEGTFTSDKSKQLEKRLVRLFIEWLIKGGHSSGKPPPK

SEQ ID NO: 560 - protein, 39 aa, Artificial Sequence
  GLP Peptide
YGEGTFTSDKSQLLEERLAHLFIEWLIAGGHSKIRPPPK

SEQ ID NO: 561 - protein, 39 aa, Artificial Sequence
  GLP Peptide
YGEGTFTSDKSQLLEERLVHLFIEWLIAGGHSKIKPPPK

SEQ ID NO: 562 - protein, 39 aa, Artificial Sequence
  GLP Peptide
YGEGTFTSDKSQLLEKELAHLFIEWLIAGGHKSGRPSPK

SEQ ID NO: 563 - protein, 39 aa, Artificial Sequence
  GLP Peptide
YGEGTFTSDKSQLLEKRLAHLFIEWLIKGGHSSIKPPPK

SEQ ID NO: 564 - protein, 39 aa, Artificial Sequence
  GLP Peptide
YGEGTFTSDKSQLLEKRLAHLFIEWLIKGGHSSIRPPPK

SEQ ID NO: 565 - protein, 44 aa, Artificial Sequence
  GLP Peptide
YSEGTFTSDLSILCEKRAVHEFIEWLIAGGPSSGKPPPKPGCGS

SEQ ID NO: 566 - protein, 9 aa, Artificial Sequence
  Peptide Extension
HKKGKPPPK

SEQ ID NO: 567 - protein, 9 aa, Artificial Sequence
  Peptide Extension
HKKGKYPPK

SEQ ID NO: 568 - protein, 9 aa, Artificial Sequence
  Peptide Extension
HKKIKPPPK

SEQ ID NO: 569 - protein, 9 aa, Artificial Sequence
  Peptide Extension
HKSGKPPPK

SEQ ID NO: 570 - protein, 9 aa, Artificial Sequence
  Peptide Extension
HKSGKYSPK

SEQ ID NO: 571 - protein, 9 aa, Artificial Sequence
  Peptide Extension
HKSGRPSPK

SEQ ID NO: 572 - protein, 9 aa, Artificial Sequence
  Peptide Extension
HKSQKPPPK

SEQ ID NO: 573 - protein, 9 aa, Artificial Sequence
  Peptide Extension
HPSGKPPPK

SEQ ID NO: 574 - protein, 8 aa, Artificial Sequence
  Peptide Extension
HSGKPPPK

SEQ ID NO: 575 - protein, 9 aa, Artificial Sequence
  Peptide Extension
HSKGKPPPK

SEQ ID NO: 576 - protein, 9 aa, Artificial Sequence
  Peptide Extension
HSKGKYPPK

SEQ ID NO: 577 - protein, 9 aa, Artificial Sequence
  Peptide Extension
HSKGRLPPK

SEQ ID NO: 578 - protein, 9 aa, Artificial Sequence
  Peptide Extension
HSKGRPPPK

SEQ ID NO: 579 - protein, 9 aa, Artificial Sequence
  Peptide Extension
HSKIKPPPK

SEQ ID NO: 580 - protein, 9 aa, Artificial Sequence
  Peptide Extension
HSKIKYPPK

SEQ ID NO: 581 - protein, 9 aa, Artificial Sequence
  Peptide Extension
HSKIRPPPK

SEQ ID NO: 582 - protein, 9 aa, Artificial Sequence
  Peptide Extension
HSKQKPPPK

SEQ ID NO: 583 - protein, 9 aa, Artificial Sequence
  Peptide Extension
HSSGKLPPK

SEQ ID NO: 584 - protein, 9 aa, Artificial Sequence
  Peptide Extension
HSSGKLSPK

SEQ ID NO: 585 - protein, 9 aa, Artificial Sequence
  Peptide Extension
HSSGKPPPK

SEQ ID NO: 586 - protein, 10 aa, Artificial Sequence
  Peptide Extension
HSSGKPPPKG

SEQ ID NO: 587 - protein, 9 aa, Artificial Sequence
  Peptide Extension
HSSGKPPPS

SEQ ID NO: 588 - protein, 9 aa, Artificial Sequence
  Peptide Extension
HSSGRLSPK

SEQ ID NO: 589 - protein, 9 aa, Artificial Sequence
  Peptide Extension
HSSGRPPPK

SEQ ID NO: 590 - protein, 9 aa, Artificial Sequence
  Peptide Extension
HSSGRYPPK

SEQ ID NO: 591 - protein, 9 aa, Artificial Sequence
  Peptide Extension
HSSGRYSPK

SEQ ID NO: 592 - protein, 9 aa, Artificial Sequence
  Peptide Extension
HSSIKPPPK

SEQ ID NO: 593 - protein, 9 aa, Artificial Sequence
  Peptide Extension
HSSIRPPPK

SEQ ID NO: 594 - protein, 9 aa, Artificial Sequence
  Peptide Extension
HSSQKPPPK

SEQ ID NO: 595 - protein, 9 aa, Artificial Sequence
  Peptide Extension
HSSQRPPPK

SEQ ID NO: 596 - protein, 9 aa, Artificial Sequence
  Peptide Extension
KSKGKPKPK

SEQ ID NO: 597 - protein, 9 aa, Artificial Sequence
  Peptide Extension
PESGAPPPS

SEQ ID NO: 598 - protein, 7 aa, Artificial Sequence
  Peptide Extension
PKKIRYS

SEQ ID NO: 599 - protein, 7 aa, Artificial Sequence
  Peptide Extension
PKKQRLS

SEQ ID NO: 600 - protein, 7 aa, Artificial Sequence
  Peptide Extension
PSKEIIS

SEQ ID NO: 601 - protein, 9 aa, Artificial Sequence
  Peptide Extension
PSKGKPPPK

SEQ ID NO: 602 - protein, 9 aa, Artificial Sequence
  Peptide Extension
PSKGRPPPK

SEQ ID NO: 603 - protein, 9 aa, Artificial Sequence
  Peptide Extension
PSKIKPPPK

SEQ ID NO: 604 - protein, 9 aa, Artificial Sequence
  Peptide Extension
PSSGAPPPE

SEQ ID NO: 605 - protein, 9 aa, Artificial Sequence
  Peptide Extension
PSSGAPPPS

SEQ ID NO: 606 - protein, 9 aa, Artificial Sequence
  Peptide Extension
PSSGEPPPE

SEQ ID NO: 607 - protein, 9 aa, Artificial Sequence
  Peptide Extension
PSSGEPPPK

SEQ ID NO: 608 - protein, 10 aa, Artificial Sequence
  Peptide Extension
PSSGEPPPKS

SEQ ID NO: 609 - protein, 9 aa, Artificial Sequence
  Peptide Extension
PSSGKLPPK

SEQ ID NO: 610 - protein, 9 aa, Artificial Sequence
  Peptide Extension
PSSGKPKPK

SEQ ID NO: 611 - protein, 9 aa, Artificial Sequence
  Peptide Extension
PSSGKPPPE

SEQ ID NO: 612 - protein, 10 aa, Artificial Sequence
  Peptide Extension
PSSGKPPPES

SEQ ID NO: 613 - protein, 9 aa, Artificial Sequence
  Peptide Extension
PSSGKPPPK

SEQ ID NO: 614 - protein, 14 aa, Artificial Sequence
  Peptide Extension
PSSGKPPPKPGCGS

SEQ ID NO: 615 - protein, 10 aa, Artificial Sequence
  Peptide Extension
PSSGKPPPKS

SEQ ID NO: 616 - protein, 9 aa, Artificial Sequence
  Peptide Extension
PSSGKYSPK

SEQ ID NO: 617 - protein, 9 aa, Artificial Sequence
  Peptide Extension
PSSGRPPPK

SEQ ID NO: 618 - protein, 9 aa, Artificial Sequence
  Peptide Extension
PSSGRYPPK

SEQ ID NO: 619 - protein, 9 aa, Artificial Sequence
  Peptide Extension
PSSIKPPPK

SEQ ID NO: 620 - protein, 9 aa, Artificial Sequence
  Peptide Extension
PVSGAPPPS

SEQ ID NO: 621 - protein, 14 aa, Artificial Sequence
  Peptide Extension
PVSGAPPSKKKKKK

SEQ ID NO: 622 - protein, 39 aa, Artificial Sequence; identical to SEQ ID NO: 553
  GLP Peptide

SEQ ID NO: 623 - protein, 39 aa, Artificial Sequence; identical to SEQ ID NO: 528
  GLP Peptide

SEQ ID NO: 624 - protein, 39 aa, Artificial Sequence; identical to SEQ ID NO: 519
  GLP Peptide

SEQ ID NO: 625 - protein, 39 aa, Artificial Sequence; identical to SEQ ID NO: 518
  GLP Peptide

SEQ ID NO: 626 - protein, 40 aa, Artificial Sequence; identical to SEQ ID NO: 340
  GLP Peptide

SEQ ID NO: 627 - protein, 40 aa, Artificial Sequence; identical to SEQ ID NO: 344
  GLP Peptide

SEQ ID NO: 628 - protein, 40 aa, Artificial Sequence
  GLP Peptide
HGEGTFTSDLSKQLEEEAVQLFIEWLLATGPSSGEPPPES

SEQ ID NO: 629 - protein, 30 aa, Artificial Sequence
  GLP Peptide
HGEGTFTSDLSKQMEEEAVRLFIEWLKNGG

SEQ ID NO: 630 - protein, 30 aa, Artificial Sequence
  GLP Peptide
HGEGTFTSDLSKQLEEEAVQLFIEWLLATG

SEQ ID NO: 631 - protein, 39 aa, Artificial Sequence
  GLP Peptide
HGEGTFTSDLSKQLEEEAVQLFIEWLLATGPSSGEPPPE

SEQ ID NO: 632 - protein, 40 aa, Artificial Sequence
  GLP Peptide
GHGEGTFTSDLSKQLEEERVQEFIEWLVKGRPSSGAPPPS

SEQ ID NO: 633 - protein, 39 aa, Artificial Sequence
  GLP Peptide
HGEGTFTSDLSKQLEEEAVQLFIEWLEATGPSSGAPPPS

SEQ ID NO: 634 - protein, 38 aa, Artificial Sequence
  GLP Peptide
GHGEGTFTSDLSIQLEEEAVRLFIEWLLAGGPKKQRLS

SEQ ID NO: 635 - protein, 30 aa, Artificial Sequence
  General Sequence I
  misc_feature (1)..(1): Xaa is H, Y or F
  misc_feature (10)..(10): Xaa is K or L
  misc_feature (12)..(12): Xaa is K, I or Q
  misc_feature (13)..(13): Xaa is Q or L
  misc_feature (15)..(15): Xaa is E, A or D
  misc_feature (16)..(16): Xaa is E, K or S
  misc_feature (17)..(17): Xaa is E, R or Q
  misc_feature (18)..(18): Xaa L, A or R
  misc_feature (19)..(19): Xaa is V, A or F
  misc_feature (20)..(20): Xaa is R, H, Q, K or I
  misc_feature (21)..(21): Xaa is L, E, H or R
  misc_feature (23)..(23): Xaa is I, Y or F
  misc_feature (27)..(27): Xaa is I, L, K or E
  misc_feature (28)..(28): Xaa is A, K, N or E
  misc_feature (29)..(29): Xaa is G, T, K or V
XGEGTFTSDXSXXLXXXXXXXFXEWLXXXG

SEQ ID NO: 636 - protein, 30 aa, Artificial Sequence
  General Sequence II
  misc_feature (10)..(10): Xaa is K or L
  misc_feature (18)..(18): Xaa is A or R
  misc_feature (20)..(20): Xaa is R or Q
  misc_feature (29)..(29): Xaa is G or T
HGEGTFTSDXSKQLEEEXVXLFIEWLKAXG

1. A GLP-1R (Glucagon-Like Peptide-1 Receptor) agonistic peptide having a GLP-1R agonistic activity which is about 9- to about 531-fold reduced as compared to GLP-1R agonistic activity of a native GLP-1(7-36) (SEQ ID NO: 260), wherein the GLP-1R agonistic peptide comprises or consists of the amino acid sequence
(SEQ ID NO: 635)
X₁-G-E-G-T-F-T-S-D-X₁₀-S-X₁₂-X₁₃-L-X₁5-X₁₆-X₁₇-X₁₈-X₁₉-
X₂₀-X₂₁-F-X₂₃-E-W-L-X₂₇-X₂₈-X₂₉-G,
wherein
X₁ is H, Y or F,
X₁₀ is K or L,
X₁₂ is K, I or Q,
X₁₃ is Q or L,
X₁₅ is E, A or D,
X₁₆ is E, K or S,
X₁₇ is E, R or Q,
X₁₈ is L, A or R,
X₁₉ is V, A or F,
X₂₀ is R, H, Q, K or I,
X₂₁ is L, E, H or R,
X₂₃ is I, Y or F,
X₂₇ is I, L, K or E,
X₂₈ is A, K, N or E, and
X₂₉ is G, T, K or V;
wherein, optionally, the amino acid sequence further comprises at least one additional amino acid residue at its N-terminus; and
wherein, optionally, the amino acid sequence further comprises a peptide extension consisting of up to about 12, about 11 or about 10 amino acid residues at its C-terminus.

2. The GLP-1R agonistic peptide according to claim 1, comprising or consisting of the amino acid sequence
(SEQ ID NO: 636)
H-G-E-G-T-F-T-S-D-X₁₀-S-K-Q-L-E-E-E-X₁₈-V-X₂₀-L-F-I-
E-W-L-K-A-X₂₉-G,
wherein
X₁₀ is K or L,
X₁₈ is A or R,
X₂₀ is R or Q, and
X₂₉ is G or T;
wherein, optionally, the amino acid sequence further comprises at least one additional amino acid residue at its N-terminus; and
wherein, optionally, the amino acid sequence further comprises a peptide extension consisting of up to about 12, about 11 or about 10 amino acid residues at its C-terminus.

3. The GLP-1R agonistic peptide according to claim 1, wherein the at least one additional amino acid residue is G or A.

4. The GLP-1R agonistic peptide according to claim 1, wherein the peptide extension consists of an amino acid sequence selected from the group consisting of SEQ ID NOs: 566 to 621.

5. The GLP-1R agonistic peptide according to claim 1, wherein the GLP-1R agonistic peptide has a GLP-1R agonistic activity which is about 9- to about 531-fold reduced as compared to the GLP-1R agonistic activity of the native GLP-1(7-36) (SEQ ID NO: 260) when the GLP-1R agonistic peptide is in its isolated form and/or when the GLP-1R agonistic peptide is part of a fusion molecule.

6. The GLP-1R agonistic peptide according to claim 1, wherein the GLP-1R agonistic peptide has a GLP-1R agonistic activity which is about 10- to about 500-fold or about 15- to about 500-fold or about 20- to about 500-fold or about 50- to about 500-fold or about 100- to about 500-fold or about 100- to about 300-fold reduced as compared to the GLP-1R agonistic activity of the native GLP-1(7-36) (SEQ ID NO: 260).

7. A GLP-1R agonistic peptide comprising or consisting of an amino acid sequence selected from the group consisting of SEQ ID NOs: 261 to 552 and 554 to 565.

8. A GLP-1R agonistic peptide comprising or consisting of an amino acid sequence of SEQ ID NO: 261 or comprising or consisting of an amino acid sequence of SEQ ID NO: 262.

9. A combination comprising a GLP-1R agonistic peptide according to claim 1, and at least one other active pharmaceutical ingredient.

10. A fusion molecule comprising a GLP-1R agonistic peptide according to claim 1, and at least one other active pharmaceutical ingredient.

11. A nucleic acid molecule encoding a GLP-1R agonistic peptide according to claim 1.

12. A host cell containing a nucleic acid molecule according to claim 11.

13. A pharmaceutical composition comprising a GLP-1R agonistic peptide according to claim 1.

14. A kit comprising a GLP-1R agonistic peptide according to claim 1.

15. A GLP-1R agonistic peptide according to claim 1 for use as a medicament.

16. A GLP-1R agonistic peptide according to claim 1 for use in the treatment of a disease or disorder selected from the group consisting of obesity, being overweight, metabolic syndrome, diabetes mellitus, hyperglycemia, dyslipidemia, Non-Alcoholic SteatoHepatitis (NASH) and atherosclerosis.

17. The GLP-1R agonistic peptide, the combination, the fusion molecule, the nucleic acid molecule, the host cell or the pharmaceutical composition for use according to claim 16, wherein the diabetes mellitus is type 1 diabetes mellitus or type 2 diabetes mellitus.
